(19) United States
(12) Patent Application Publication
(10) Pub. No.: US 2026/0132196 A1
(43) Pub. Date: May 14, 2026

(54) POLYPEPTIDE CONSTRUCTS SELECTIVELY BINDING TO CLDN6 AND CD3

(71) Applicants: AMGEN RESEARCH (MUNICH) GMBH, Munich (DE); AMGEN INC., Thousand Oaks, CA (US)

(72) Inventors: Christoph Dahlhoff, Munich (DE); Tobias Raum, Munich (DE); Jonas Anlahr, Munich (DE); Claudia Blümel, Munich (DE); Lars Gaedtke, Munich (DE); Silke Quaglia, Munich (DE); Jonas Honer, Munich (DE); Julie Bailis, Thousand Oaks, CA (US); Elizabeth Dang Pham, Thousand Oaks, CA (US); Christopher M. Murawsky, Thousand Oaks, CA (US); Benjamin M. Alba, South San Francisco, CA (US)

(21) Appl. No.: 18/251,210

(22) PCT Filed: Nov. 8, 2021
(86) PCT No.: PCT/EP2021/080863

§ 371 Date: Oct. 20, 2023

Related U.S. Application Data
(60) Provisional application No. 63/110,817, filed on Nov. 6, 2020.
(60) Provisional application No. 63/139,419, filed on Jan. 20, 2021.

(51) Int. Cl. C07K 16/28; A61K 39/00; A61P 35/00; A61P 37/04

(52) U.S. Cl. CPC C07K 16/28; A61P 35/00; A61P 37/04; C07K 16/2809; A61K 2039/505; C07K 2317/31; C07K 2317/33; C07K 2317/565; C07K 2317/567; C07K 2317/622; C07K 2317/734; C07K 2317/92; C07K 2317/94

(57) ABSTRACT

The present invention relates to a polypeptide or a polypeptide construct comprising a domain which binds to Claudin 6 (CLDN6) and another domain which binds to CD3. Moreover, the invention provides a polynucleotide encoding the construct, a vector comprising said polynucleotide and a host cell transformed or transfected with said polynucleotide or vector. Furthermore, the invention provides a process for producing the construct of the invention, a medical use of said construct and a kit comprising said construct.

[0001] This application includes a sequence listing submitted electronically by the file name 55920 Sub SeqListing txt; Size: 1,410,902 bytes; Created Aug. 19, 2025, and is incorporated herein by reference.

[0002] The present invention relates to polypeptides/polypeptide constructs comprising a domain comprising a paratope which binds to Claudin 6 (CLDN6) and another domain which comprises a paratope that binds to CD3. Moreover, the invention provides polynucleotides encoding the polypeptides/polypeptide constructs, vectors comprising said polynucleotides and host cells transformed or transfected with said polynucleotides or vectors. Furthermore, the invention provides processes for producing the polypeptides/polypeptide constructs of the invention, medical uses of said polypeptides/polypeptide constructs and kits comprising said constructs.

### BACKGROUND OF THE INVENTION

[0003] Claudins are key structural and functional components of epithelial tight junctions located between two adjacent cells, which regulate cell-cell permeability, maintain ion homeostasis, and support cell adhesion and polarity. Claudins are tetraspan transmembrane proteins of 22-27 kDa that multimerize within or across cell membranes to form a protective barrier. The 24 claudin proteins that have been reported differ in terms of their tissue localization and expression and by their interactions with other proteins.

[0004] Claudin 6 (CLDN6) was initially identified in a similarity search for further genes and proteins that belong to the Claudin family of genes and proteins (Morita et al., Proc. Natl. Acad. Sci. USA, Vol. 96, pp. 511-516, 1999). Claudin 6 mRNA expression was not detected in adult tissues, but only in embryonic tissues. Subsequently, mRNA and protein expression were detected in various tumors and tumor cell lines. Consistent with this finding, Claudin-6 is regarded as a carcino-embryonic transmembrane protein, which is absent from normal adult human tissue. CLDN6 expression is abberantly activated in various cancer types, such as ovarian, lung, gastric, breast, germ cell, and pediatric cancers (Stadler et al., Onocoimmunology 2016, Vol. 5, No. 3, e1091555 and therein cited reference, e.g., Micke et al, Int. J. Cancer 2014:2206-14; Rendón-Huerta et al., J. Gastrointest. Cancer 2010; 41: 52-59; Ushiku et al., Histopathology 2012, 61:1043-56); Ben-David et al., Nat. Commun. 2013; 4:1992; Birks et al., BRAIN PATHOL. 2010; 20:140-50), Sullivan et al., Am. J. Surg. Pathol. 2012; 36:73-80).

[0005] CLDN6 is a 220 amino acid protein with two extracellular loops (ECL), which has substantial sequence identity to CLDN9 with only three amino acid residues that are different in the two ECLs.

[0006] The expression of CLDN6 in multiple tumor types, with normal tissue expression restricted to fetal development, has led to the consideration of CLDN6 as a therapeutic target in various types of cancer, for example, in ovarian and non-small cell lung cancer (NSCLC) and other indications.

[0007] Ovarian and NSCLC cancers remain indications with high unmet medical need.

[0008] Ovarian cancer is the seventh most-common cancer worldwide. In 2018 there were 295,414 new cases and 184,799 deaths worldwide, with a higher mortality in countries of the Northern hemisphere than in Asia or Africa. (Bray et al., CA Cancer J Clin 2018). Typical first-line treatment involves surgery and combination chemotherapy that includes platinum and paclitaxel or docetaxel. More recently, the anti-VEGF antibody bevacizumab and PARP inhibitors have been approved as maintenance therapy following first-line chemotherapy. However, despite initial response, up to 70% of patients experience disease recurrence due to development of chemoresistance and/or tumor immune evasion. Ovarian tumors are characterized by a highly immunosuppressive tumor microenvironment; while there is evidence that ovarian tumors can be immunogenic, immune checkpoint therapies that have changed the standard of care in other solid tumor types have shown limited durability in ovarian cancer (Rodriguez et al., Cancers 2018). Despite the advancement of multiple novel therapies and combinations to clinical testing in ovarian cancer, the 5-year survival rate remains low and there remains an urgent need for therapies that can enable durable response.

[0009] Lung cancer is one of the most common cancers worldwide, with over 2 million new cases and 1.7 million deaths reported in 2018 (Bray et al., CA: A Cancer Journal for Clinicians 2018). Non-small cell lung cancer (NSCLC) comprises the majority (85%) of lung cancer cases and is often associated with smoking and environmental exposures such as asbestos (Zappa and Mousa, Transl Lung Cancer Res 2016). The recommended first-line treatment for NSCLC is immune checkpoint blockade with platinum doublet chemotherapy for patients whose tumors express PD-L1, although targeted therapy may be preferred for initial treatment of tumors with driver mutations (Ettinger et al., JNCCN, 2019). While these advances are promising and in the case of immune checkpoint blockade have enabled long-term durable response for some patients (Santini and Hellman, Cancer J 2018), further evaluation of immunotherapy combinations and the advancement of additional, new therapies are needed for treatment of most patients.

[0010] New therapies with the potential to provide durable response to a larger patient population are therefore still needed for the treatment of ovarian cancer and/or NSCLC, and particularly to any type of cancer that expresses CLDN6, more particularly for the treatment of cancer patients in second line treatment or higher, such as patients that have previously received chemotherapy or immunotherapy and who have relapsing disease.

[0011] Bispecific (and multispecific) constructs comprising one antigen-binding (more precisely, an epitope-binding) domain that binds to CD3 on a T cell and one antigen-binding (more precisely, an epitope-binding) domain that binds to a protein expressed on a target cell directly connect T cells to target cells to induce T cell redirected lysis. This mechanism of action is distinct from chemotherapy, targeted therapy and other immunotherapy in that it can work with any CD3-positive T cell, independent of a costimulatory activating signal (Klinger et al., Immunol Reviews 2016).

[0012] The expression of CLDN6 on the cell surface of germ cell tumors, ovarian cancer, and non-small cell lung cancer provides a basis for targeting these tumor types with CLDN6×CD3 polypeptides/polypeptide constructs. Furthermore, CLDN6×CD3 polypeptides/polypeptide constructs has the potential to target additional tumor types that express CLDN6, and particularly to any type of cancer that expresses CLDN6, more particularly for the treatment of cancer patients in second line treatment or higher, such as patients that have previously received chemotherapy or immunotherapy and who have relapsing disease.

### DETAILED DESCRIPTION OF THE INVENTION

[0013] The present invention provides new polypeptides/polypeptide construct as compounds that selectively and, preferably, specifically bind to CLDN6 (SEQ ID NO: 1) or any isoforms thereof, compositions comprising such compounds, methods of treatment and prevention of neoplastic diseases using the herein disclosed products, kits comprising the herein disclosed products, products for the use as a medicament, particularly for the use in the treatment and prevention of neoplastic diseases. The amino acid sequence of human CLDN6 and related information may be found in the UniProt database under accession number P56747.

### Compounds of the Invention

[0014] In one aspect, the present invention provides a polypeptide/polypeptide construct comprising, or consisting of, a domain, which binds to CLDN6 (SEQ ID NO: 1 or a fragment thereof or a variant of the amino acid sequence) on the surface of a target cell and a domain, which binds to CD3 on the surface of a T cell, the binding to both, CLDN6 and CD3, allow the T cell's activation. The binding of the polypeptide construct according to the invention engages T cells, i.e., binds to CD3, and brings a T cell and the target cell into close contact to allow activated T cells to induce cytotoxic/cytolytic mechanisms resulting in the destruction of the target cell (T cell-dependent cytotoxicity).

[0015] Further, the present invention provides a polypeptide/polypeptide construct comprising, or consisting of, a domain, which comprises a paratope (i.e., an antigen-binding domain, more particularly an epitope-binding structure), which binds to CLDN6, wherein optionally the domain comprising a paratope (i.e., an antigen-binding (epitope-binding) structure) of the polypeptides/polypeptide constructs of the invention is capable of binding CLDN6 on the surface of a cell that expresses CLDN6 binds to the E1A and/or the E2B regions of CLDN6 (SEQ ID NO: 1). Thus, the present invention provides a polypeptide/polypeptide construct comprising, or consisting of, a domain which binds to CLDN6, wherein optionally the domain is capable of binding CLDN6 on the surface of a cell that expresses CLDN6 binds to the E1A and/or the E2B regions the sequence corresponding to the E1A and/or E2B regions of these loops that are depicted in SEQ ID NOS: 9 and 10.

[0016] In embodiments of the invention the polypeptide/polypeptide construct comprising, or consisting of, a domain, which comprises a paratope (i.e., an antigen-binding domain, more particularly an epitope-binding structure), which binds to CLDN6, wherein optionally the domain comprising a paratope (i.e., an antigen-binding (epitope-binding) structure) of the polypeptides/polypeptide constructs of the invention is capable of binding CLDN6 on the surface of a cell that expresses CLDN6 binds to the E1A and/or the E2B regions of CLDN6 (SEQ ID NO: 1) does not bind to amino acids 138-150 of CLDN6 as depicted in SEQ ID NO: 1. In further embodiments of the invention the polypeptide/polypeptide construct comprising, or consisting of, a domain, which binds to CLDN6 binds to the E1A and/or the E2B regions of CLDN6 (SEQ ID NO: 1) does not bind to amino acids 138-150 of CLDN6 as depicted in SEQ ID NO: 1.

[0017] Accordingly, the present invention provides polypeptides/polypeptide constructs comprising, or consisting of, a domain, which comprises a paratope (i.e. an antigen-binding domain, more particularly an epitope-binding structure), which binds to an epitope region comprising amino acids of the extracellular loop 1 (ECL1) of CLDN6, preferably one comprising amino acids 29-39 of SEQ ID NO: 1 and/or comprising amino acids of the extracellular loop 2 (ECL2) of CLDN6 corresponding to amino acids 151-160 of SEQ ID NO: 1 on the surface of a target cell. Thus, the present invention provides polypeptides/polypeptide constructs comprising, or consisting of, a domain, which binds to an epitope region comprising amino acids of the extracellular loop 1 (ECL1) of CLDN6, preferably one comprising amino acids 29-39 of SEQ ID NO: 1 and/or comprising amino acids of the extracellular loop 2 (ECL2) of CLDN6 corresponding to amino acids 151-160 of SEQ ID NO: 1 on the surface of a target cell.

[0018] Accordingly, the present invention provides polypeptides/polypeptide constructs as defined in any one of the preceding paragraphs comprising another domain, which comprises a paratope (i.e. an antigen-binding structure (epitope-binding structure)) that recognizes and/or binds to an extracellular epitope of the CD3ε chain (preferably, the human and the Macaca CD3ε chain), and a domain which extends the half-life (HLE domain) of the polypeptide after administration to an individual, which optionally comprises two polypeptide monomers, each comprising a hinge, a CH2 domain and a CH3 domain. Thus, the present invention provides polypeptides/polypeptide constructs as defined in any one of the preceding paragraphs comprising another domain, which recognizes and/or binds to an extracellular epitope of the CD3ε chain (preferably, the human and the Macaca CD3ε chain), and a domain which extends the half-life (HLE domain) of the polypeptide after administration to an individual, which optionally comprises two polypeptide monomers, each comprising a hinge, a CH2 domain and a CH3 domain.

[0019] According to the invention, polypeptides/polypeptide constructs are provided, wherein a domain of the construct binds immunoselectively to an epitope of CLDN6 recognized and/or bound by a paratope (an antigen-binding or epitope-binding structure) comprised in any one of the sequences referred to in in a) to s) below, a) to d), n) and s) being preferred, a) to c), e) and s) being much preferred):
[0020] a) a VH region comprising a CDR-H1 depicted in SEQ ID NO: 13, a CDR-H2 depicted in SEQ ID NO: 14, and a CDR-H3 depicted in SEQ ID NO: 15, and a VL region comprising a CDR-L1 depicted in SEQ ID NO: 16, a CDR-L2 depicted in SEQ ID NO: 17 and a CDR-L3 depicted in SEQ ID NO: 18;
[0021] b) a VH region comprising a CDR-H1 depicted in SEQ ID NO: 27, a CDR-H2 depicted in SEQ ID NO: 28, and a CDR-H3 depicted in SEQ ID NO: 29, and a VL region comprising a CDR-L1 depicted in SEQ ID NO: 30, a CDR-L2 depicted in SEQ ID NO: 31 and a CDR-L3 depicted in SEQ ID NO: 32;
[0022] c) a VH region comprising a CDR-H1 depicted in SEQ ID NO: 41, a CDR-H2 depicted in SEQ ID NO: 42, and a CDR-H3 depicted in SEQ ID NO: 43, and a VL region comprising a CDR-L1 depicted in SEQ ID NO: 44, a CDR-L2 depicted in SEQ ID NO: 45 and a CDR-L3 depicted in SEQ ID NO: 46;
[0023] d) a VH region comprising a CDR-H1 depicted in SEQ ID NO: 55, a CDR-H2 depicted in SEQ ID NO: 56, and a CDR-H3 depicted in SEQ ID NO: 57, and a VL region comprising a CDR-L1 depicted in SEQ ID NO: 58, a CDR-L2 depicted in SEQ ID NO: 59 and a CDR-L3 depicted in SEQ ID NO: 60;
[0024] e) a VH region comprising a CDR-H1 depicted in SEQ ID NO: 69, a CDR-H2 depicted in SEQ ID NO: 70, and a CDR-H3 depicted in SEQ ID NO: 71, and a VL region comprising a CDR-L1 depicted in SEQ ID NO: 72, a CDR-L2 depicted in SEQ ID NO: 73 and a CDR-L3 depicted in SEQ ID NO: 74;
[0025] f) a VH region comprising a CDR-H1 depicted in SEQ ID NO: 83, a CDR-H2 depicted in SEQ ID NO: 84, and a CDR-H3 depicted in SEQ ID NO: 85, and a VL region comprising a CDR-L1 depicted in SEQ ID NO: 86, a CDR-L2 depicted in SEQ ID NO: 87 and a CDR-L3 depicted in SEQ ID NO: 88;
[0026] g) a VH region comprising a CDR-H1 depicted in SEQ ID NO: 97, a CDR-H2 depicted in SEQ ID NO: 98, and a CDR-H3 depicted in SEQ ID NO: 99, and a VL region comprising a CDR-L1 depicted in SEQ ID NO: 100, a CDR-L2 depicted in SEQ ID NO: 101 and a CDR-L3 depicted in SEQ ID NO: 102;
[0027] h) a VH region comprising a CDR-H1 depicted in SEQ ID NO: 111, a CDR-H2 depicted in SEQ ID NO: 112, and a CDR-H3 depicted in SEQ ID NO: 113, and a VL region comprising a CDR-L1 depicted in SEQ ID NO: 114, a CDR-L2 depicted in SEQ ID NO: 115 and a CDR-L3 depicted in SEQ ID NO: 116;
[0028] i) a VH region comprising a CDR-H1 depicted in SEQ ID NO: 125, a CDR-H2 depicted in SEQ ID NO: 126, and a CDR-H3 depicted in SEQ ID NO: 127, and a VL region comprising a CDR-L1 depicted in SEQ ID NO: 128, a CDR-L2 depicted in SEQ ID NO: 129 and a CDR-L3 depicted in SEQ ID NO: 130;
[0029] j) a VH region comprising a CDR-H1 depicted in SEQ ID NO: 139, a CDR-H2 depicted in SEQ ID NO: 140, and a CDR-H3 depicted in SEQ ID NO: 141, and a VL region comprising a CDR-L1 depicted in SEQ ID NO: 142, a CDR-L2 depicted in SEQ ID NO: 143 and a CDR-L3 depicted in SEQ ID NO: 144;
[0030] k) a VH region comprising a CDR-H1 depicted in SEQ ID NO: 153, a CDR-H2 depicted in SEQ ID NO: 154, and a CDR-H3 depicted in SEQ ID NO: 155, and a VL region comprising a CDR-L1 depicted in SEQ ID NO: 156, a CDR-L2 depicted in SEQ ID NO: 157 and a CDR-L3 depicted in SEQ ID NO: 158;
[0031] l) a VH region comprising a CDR-H1 depicted in SEQ ID NO: 167, a CDR-H2 depicted in SEQ ID NO: 168, and a CDR-H3 depicted in SEQ ID NO: 169, and a VL region comprising a CDR-L1 depicted in SEQ ID NO: 170, a CDR-L2 depicted in SEQ ID NO: 171 and a CDR-L3 depicted in SEQ ID NO: 172;
[0032] m) a VH region comprising a CDR-H1 depicted in SEQ ID NO: 181, a CDR-H2 depicted in SEQ ID NO: 182, and a CDR-H3 depicted in SEQ ID NO: 183, and a VL region comprising a CDR-L1 depicted in SEQ ID NO: 184, a CDR-L2 depicted in SEQ ID NO: 185 and a CDR-L3 depicted in SEQ ID NO: 186;
[0033] n) a VH region comprising a CDR-H1 depicted in SEQ ID NO: 195, a CDR-H2 depicted in SEQ ID NO: 196, and a CDR-H3 depicted in SEQ ID NO: 197, and a VL region comprising a CDR-L1 depicted in SEQ ID NO: 198, a CDR-L2 depicted in SEQ ID NO: 199 and a CDR-L3 depicted in SEQ ID NO: 200;
[0034] o) a VH region comprising a CDR-H1 depicted in SEQ ID NO: 209, a CDR-H2 depicted in SEQ ID NO: 210, and a CDR-H3 depicted in SEQ ID NO: 211, and a VL region comprising a CDR-L1 depicted in SEQ ID NO: 212, a CDR-L2 depicted in SEQ ID NO: 213 and a CDR-L3 depicted in SEQ ID NO: 214;
[0035] p) a VH region comprising a CDR-H1 depicted in SEQ ID NO: 223, a CDR-H2 depicted in SEQ ID NO: 224, and a CDR-H3 depicted in SEQ ID NO: 225, and a VL region comprising a CDR-L1 depicted in SEQ ID NO: 226, a CDR-L2 depicted in SEQ ID NO: 227 and a CDR-L3 depicted in SEQ ID NO: 228;
[0036] q) a VH region comprising a CDR-H1 depicted in SEQ ID NO: 237, a CDR-H2 depicted in SEQ ID NO: 238, and a CDR-H3 depicted in SEQ ID NO: 239, and a VL region comprising a CDR-L1 depicted in SEQ ID NO: 240, a CDR-L2 depicted in SEQ ID NO: 241 and a CDR-L3 depicted in SEQ ID NO: 242;
[0037] r) a VH region comprising a CDR-H1 depicted in SEQ ID NO: 251, a CDR-H2 depicted in SEQ ID NO: 252, and a CDR-H3 depicted in SEQ ID NO: 253, and a VL region comprising a CDR-L1 depicted in SEQ ID NO: 254, a CDR-L2 depicted in SEQ ID NO: 255 and a CDR-L3 as depicted in SEQ ID NO: 256,
[0038] s) a VH region comprising a CDR-H1 depicted in SEQ ID NO: 265, a CDR-H2 depicted in SEQ ID NO: 266, and a CDR-H3 depicted in SEQ ID NO: 267, and a VL region comprising a CDR-L1 depicted in SEQ ID NO: 268, a CDR-L2 depicted in SEQ ID NO: 269, and a CDR-L3 as depicted in SEQ ID NO: 270, and
[0039] t) a VH region comprising a CDR-H1 depicted in SEQ ID NO: 680, a CDR-H2 depicted in any one of SEQ ID NOs: 681, 682 or 683, and a CDR-H3 depicted in any one of SEQ ID NOs: 684, 685, 686 or 687, and a VL region comprising a CDR-L1 depicted in any one of SEQ ID NOs: 688 or 689, a CDR-L2 depicted in SEQ ID NO: 690, and a CDR-L3 as depicted in any one of SEQ ID NOs: 691, 692, 693 or 694, and any possible combination to the herein described CDR of the heavy and light chains.

[0040] The constructs of the preceding paragraph accordingly preferably comprise at least one domain comprising a paratope binding CLDN6 as defined in sections (a) to (s), optionally further comprising a domain comprising a domain to CD3, e.g., the constructs of the preceding paragraph accordingly preferably binding CLDN6 and having the VL and or VH regions comprising the CDRs as defined in sections (a) to (s), optionally further comprising a domain comprising a domain to CD3.

[0041] According to the invention, polypeptides/polypeptide constructs are provided comprising a domain comprising a paratope (an antigen-binding (epitope-binding) structure)) that binds (immunoselectively) to an epitope recognized by a domain comprising a VH region comprising a CDR-H1 depicted in SEQ ID NO: 13, a CDR-H2 depicted in SEQ ID NO: 14, and a CDR-H3 depicted in SEQ ID NO: 15, and a VL region comprising a CDR-L1 depicted in SEQ ID NO: 16, a CDR-L2 depicted in SEQ ID NO: 17 and a CDR-L3 depicted in SEQ ID NO: 18. Therefore, according to the invention, polypeptides/polypeptide constructs are provided comprising a domain that binds (immunoselectively) to an epitope recognized by a domain comprising a VH region comprising a CDR-H1 depicted in SEQ ID NO: 13, a CDR-H2 depicted in SEQ ID NO: 14, and a CDR-H3 depicted in SEQ ID NO: 15, and a VL region comprising a CDR-L1 depicted in SEQ ID NO: 16, a CDR-L2 depicted in SEQ ID NO: 17 and a CDR-L3 depicted in SEQ ID NO: 18.

[0042] According to the invention, polypeptides/polypeptide constructs are provided comprising a domain comprising a paratope (an antigen-binding (epitope-binding) structure)) that binds (immunoselectively) to an epitope recognized by a domain comprising a VH region comprising a CDR-H1 depicted in SEQ ID NO: 27, a CDR-H2 depicted in SEQ ID NO: 28, and a CDR-H3 depicted in SEQ ID NO: 29, and a VL region comprising a CDR-L1 depicted in SEQ ID NO: 30, a CDR-L2 depicted in SEQ ID NO: 31 and a CDR-L3 depicted in SEQ ID NO: 32. In other words, according to the invention, polypeptides/polypeptide constructs are provided comprising a domain that binds (immunoselectively) to an epitope recognized by a domain comprising a VH region comprising a CDR-H1 depicted in SEQ ID NO: 27, a CDR-H2 depicted in SEQ ID NO: 28, and a CDR-H3 depicted in SEQ ID NO: 29, and a VL region comprising a CDR-L1 depicted in SEQ ID NO: 30, a CDR-L2 depicted in SEQ ID NO: 31 and a CDR-L3 depicted in SEQ ID NO: 32.

[0043] According to the invention, polypeptides/polypeptide constructs are provided comprising a domain comprising a paratope (an antigen-binding (epitope-binding) structure)) that binds (immunoselectively) to an epitope recognized by a domain comprising a VH region comprising a CDR-H1 depicted in SEQ ID NO: 41, a CDR-H2 depicted in SEQ ID NO: 42, and a CDR-H3 depicted in SEQ ID NO: 43, and a VL region comprising a CDR-L1 depicted in SEQ ID NO: 44, a CDR-L2 depicted in SEQ ID NO: 45 and a CDR-L3 depicted in SEQ ID NO: 46. Therefore, according to the invention, polypeptides/polypeptide constructs are provided comprising a domain that binds (immunoselectively) to an epitope recognized by a domain comprising a VH region comprising a CDR-H1 depicted in SEQ ID NO: 41, a CDR-H2 depicted in SEQ ID NO: 42, and a CDR-H3 depicted in SEQ ID NO: 43, and a VL region comprising a CDR-L1 depicted in SEQ ID NO: 44, a CDR-L2 depicted in SEQ ID NO: 45 and a CDR-L3 depicted in SEQ ID NO: 46.

[0044] According to the invention, polypeptides/polypeptide constructs are provided comprising a domain comprising a paratope (an antigen-binding (epitope-binding) structure)) that binds (immunoselectively) to an epitope recognized by a domain comprising a VH region comprising a CDR-H1 depicted in SEQ ID NO: 69, a CDR-H2 depicted in SEQ ID NO: 70, and a CDR-H3 depicted in SEQ ID NO: 71, and a VL region comprising a CDR-L1 depicted in SEQ ID NO: 72, a CDR-L2 depicted in SEQ ID NO: 73 and a CDR-L3 depicted in SEQ ID NO: 74. Therefore, according to the invention, polypeptides/polypeptide constructs are provided comprising a domain that binds (immunoselectively) to an epitope recognized by a domain comprising a VH region comprising a CDR-H1 depicted in SEQ ID NO: 69, a CDR-H2 depicted in SEQ ID NO: 70, and a CDR-H3 depicted in SEQ ID NO: 71, and a VL region comprising a CDR-L1 depicted in SEQ ID NO: 72, a CDR-L2 depicted in SEQ ID NO: 73 and a CDR-L3 depicted in SEQ ID NO: 74.

[0045] According to the invention, polypeptides/polypeptide constructs are provided comprising a domain comprising a paratope (an antigen-binding (epitope-binding) structure)) that binds (immunoselectively) to an epitope recognized by a domain comprising a VH region comprising a CDR-H1 depicted in SEQ ID NO: 195, a CDR-H2 depicted in SEQ ID NO: 196, and a CDR-H3 depicted in SEQ ID NO: 197, and a VL region comprising a CDR-L1 depicted in SEQ ID NO: 198, a CDR-L2 depicted in SEQ ID NO: 199 and a CDR-L3 depicted in SEQ ID NO: 200. Therefore, according to the invention, polypeptides/polypeptide constructs are provided comprising a domain that binds (immunoselectively) to an epitope recognized by a domain comprising a VH region comprising a CDR-H1 depicted in SEQ ID NO: 195, a CDR-H2 depicted in SEQ ID NO: 196, and a CDR-H3 depicted in SEQ ID NO: 197, and a VL region comprising a CDR-L1 depicted in SEQ ID NO: 198, a CDR-L2 depicted in SEQ ID NO: 199 and a CDR-L3 depicted in SEQ ID NO: 200.

[0046] According to the invention, polypeptides/polypeptide constructs are provided comprising a domain comprising a paratope (an antigen-binding (epitope-binding) structure)) that binds (immunoselectively) to an epitope recognized by a domain comprising a VH region comprising a CDR-H1 depicted in SEQ ID NO: 237, a CDR-H2 depicted in SEQ ID NO: 238, and a CDR-H3 depicted in SEQ ID NO: 239, and a VL region comprising a CDR-L1 depicted in SEQ ID NO: 240, a CDR-L2 depicted in SEQ ID NO: 241, and a CDR-L3 as depicted in SEQ ID NO: 242. Therefore, according to the invention, polypeptides/polypeptide constructs are provided comprising a domain that binds (immunoselectively) to an epitope recognized by a domain comprising a VH region comprising a CDR-H1 depicted in SEQ ID NO: 237, a CDR-H2 depicted in SEQ ID NO: 238, and a CDR-H3 depicted in SEQ ID NO: 239, and a VL region comprising a CDR-L1 depicted in SEQ ID NO: 240, a CDR-L2 depicted in SEQ ID NO: 241, and a CDR-L3 as depicted in SEQ ID NO: 242.

[0047] According to the invention, polypeptides/polypeptide constructs are provided, wherein
[0048] (i) a domain comprises a paratope (an antigen-binding (epitope-binding) structure) that binds (immunoselectively) to an epitope region that comprises amino acids of the first extracellular loop of CLDN6 (as depticed in SEQ ID NO: 1), also referred to as extracellular loop 1 (ECL1); said epitope region being depicted in SEQ ID NO: 9, and optionally comprises any one of the sequences referred to in a) to s) below, and/or
[0049] (ii) a domain comprises a paratope (an antigen-binding (epitope-binding) structure) that binds (immunoselectively) to an epitope region that comprises amino acids of the second extracellular loop of CLDN6 (as depticed in SEQ ID NO: 1), also referred to as extracellular loop 2 (ECL2); said epitope region being depicted in SEQ ID NO:10, and optionally comprises any one of the sequences referred to in a) to s) below; and/or
[0050] (iii) a domain comprises a paratope (an antigen-binding (epitope-binding) structure) that binds (immunoselectively) to an epitope region comprising amino acids of ECL1 and ECL2 of CLDN6, preferably those comprising amino acids of the epitope region comprising SEQ ID NOs: 9 and 10, and which optionally comprises any one of the structures referred to in a) to s) below; and/or
[0051] (iv) a domain comprises a paratope (an antigen-binding (epitope-binding) structure) that binds (immunoselectively) to the same epitope of CLDN6 as an antibody or polypeptide construct comprising a paratope which binds to CLDN6 on the surface of a target cell and which comprises any one of the sequences referred to in a) to s) below:
[0052] a) a VH region comprising a CDR-H1 depicted in SEQ ID NO: 13, a CDR-H2 depicted in SEQ ID NO: 14, and a CDR-H3 depicted in SEQ ID NO: 15, and a VL region comprising a CDR-L1 depicted in SEQ ID NO: 16, a CDR-L2 depicted in SEQ ID NO: 17 and a CDR-L3 depicted in SEQ ID NO: 18;
[0053] b) a VH region comprising a CDR-H1 depicted in SEQ ID NO: 27, a CDR-H2 depicted in SEQ ID NO: 28, and a CDR-H3 depicted in SEQ ID NO: 29, and a VL region comprising a CDR-L1 depicted in SEQ ID NO: 30, a CDR-L2 depicted in SEQ ID NO: 31 and a CDR-L3 depicted in SEQ ID NO: 32;
[0054] c) a VH region comprising a CDR-H1 depicted in SEQ ID NO: 41, a CDR-H2 depicted in SEQ ID NO: 42, and a CDR-H3 depicted in SEQ ID NO: 43, and a VL region comprising a CDR-L1 depicted in SEQ ID NO: 44, a CDR-L2 depicted in SEQ ID NO: 45 and a CDR-L3 depicted in SEQ ID NO: 46;
[0055] d) a VH region comprising a CDR-H1 depicted in SEQ ID NO: 55, a CDR-H2 depicted in SEQ ID NO: 56, and a CDR-H3 depicted in SEQ ID NO: 57, and a VL region comprising a CDR-L1 depicted in SEQ ID NO: 58, a CDR-L2 depicted in SEQ ID NO: 59 and a CDR-L3 depicted in SEQ ID NO: 60;
[0056] e) a VH region comprising a CDR-H1 depicted in SEQ ID NO: 69, a CDR-H2 depicted in SEQ ID NO: 70, and a CDR-H3 depicted in SEQ ID NO: 71, and a VL region comprising a CDR-L1 depicted in SEQ ID NO: 72, a CDR-L2 depicted in SEQ ID NO: 73 and a CDR-L3 depicted in SEQ ID NO: 74;
[0057] f) a VH region comprising a CDR-H1 depicted in SEQ ID NO: 83, a CDR-H2 depicted in SEQ ID NO: 84, and a CDR-H3 depicted in SEQ ID NO: 85, and a VL region comprising a CDR-L1 depicted in SEQ ID NO: 86, a CDR-L2 depicted in SEQ ID NO: 87 and a CDR-L3 depicted in SEQ ID NO: 88;
[0058] g) a VH region comprising a CDR-H1 depicted in SEQ ID NO: 97, a CDR-H2 depicted in SEQ ID NO: 98, and a CDR-H3 depicted in SEQ ID NO: 99, and a VL region comprising a CDR-L1 depicted in SEQ ID NO: 100, a CDR-L2 depicted in SEQ ID NO: 101 and a CDR-L3 depicted in SEQ ID NO: 102;
[0059] h) a VH region comprising a CDR-H1 depicted in SEQ ID NO: 111, a CDR-H2 depicted in SEQ ID NO: 112, and a CDR-H3 depicted in SEQ ID NO: 113, and a VL region comprising a CDR-L1 depicted in SEQ ID NO: 114, a CDR-L2 depicted in SEQ ID NO: 115 and a CDR-L3 depicted in SEQ ID NO: 116;
[0060] i) a VH region comprising a CDR-H1 depicted in SEQ ID NO: 125, a CDR-H2 depicted in SEQ ID NO: 126, and a CDR-H3 depicted in SEQ ID NO: 127, and a VL region comprising a CDR-L1 depicted in SEQ ID NO: 128, a CDR-L2 depicted in SEQ ID NO: 129 and a CDR-L3 depicted in SEQ ID NO: 130;
[0061] j) a VH region comprising a CDR-H1 depicted in SEQ ID NO: 139, a CDR-H2 depicted in SEQ ID NO: 140, and a CDR-H3 depicted in SEQ ID NO: 141, and a VL region comprising a CDR-L1 depicted in SEQ ID NO: 142, a CDR-L2 depicted in SEQ ID NO: 143 and a CDR-L3 depicted in SEQ ID NO: 144;
[0062] k) a VH region comprising a CDR-H1 depicted in SEQ ID NO: 153, a CDR-H2 depicted in SEQ ID NO: 154, and a CDR-H3 depicted in SEQ ID NO: 155, and a VL region comprising a CDR-L1 depicted in SEQ ID NO: 156, a CDR-L2 depicted in SEQ ID NO: 157 and a CDR-L3 depicted in SEQ ID NO: 158;
[0063] l) a VH region comprising a CDR-H1 depicted in SEQ ID NO: 167, a CDR-H2 depicted in SEQ ID NO: 168, and a CDR-H3 depicted in SEQ ID NO: 169, and a VL region comprising a CDR-L1 depicted in SEQ ID NO: 170, a CDR-L2 depicted in SEQ ID NO: 171 and a CDR-L3 depicted in SEQ ID NO: 172;
[0064] m) a VH region comprising a CDR-H1 depicted in SEQ ID NO: 181, a CDR-H2 depicted in SEQ ID NO: 182, and a CDR-H3 depicted in SEQ ID NO: 183, and a VL region comprising a CDR-L1 depicted in SEQ ID NO: 184, a CDR-L2 depicted in SEQ ID NO: 185 and a CDR-L3 depicted in SEQ ID NO: 186;
[0065] n) a VH region comprising a CDR-H1 depicted in SEQ ID NO: 195, a CDR-H2 depicted in SEQ ID NO: 196, and a CDR-H3 depicted in SEQ ID NO: 197, and a VL region comprising a CDR-L1 depicted in SEQ ID NO: 198, a CDR-L2 depicted in SEQ ID NO: 199 and a CDR-L3 depicted in SEQ ID NO: 200;
[0066] o) a VH region comprising a CDR-H1 depicted in SEQ ID NO: 209, a CDR-H2 depicted in SEQ ID NO: 210, and a CDR-H3 depicted in SEQ ID NO: 211, and a VL region comprising a CDR-L1 depicted in SEQ ID NO: 212, a CDR-L2 depicted in SEQ ID NO: 213 and a CDR-L3 depicted in SEQ ID NO: 214;
[0067] p) a VH region comprising a CDR-H1 depicted in SEQ ID NO: 223, a CDR-H2 depicted in SEQ ID NO: 224, and a CDR-H3 depicted in SEQ ID NO: 225, and a VL region comprising a CDR-L1 depicted in SEQ ID NO: 226, a CDR-L2 depicted in SEQ ID NO: 227 and a CDR-L3 depicted in SEQ ID NO: 228;
[0068] q) a VH region comprising a CDR-H1 depicted in SEQ ID NO: 237, a CDR-H2 depicted in SEQ ID NO: 238, and a CDR-H3 depicted in SEQ ID NO: 239, and a VL region comprising a CDR-L1 depicted in SEQ ID NO: 240, a CDR-L2 depicted in SEQ ID NO: 241 and a CDR-L3 depicted in SEQ ID NO: 242;
[0069] r) a VH region comprising a CDR-H1 depicted in SEQ ID NO: 251, a CDR-H2 depicted in SEQ ID NO: 252, and a CDR-H3 depicted in SEQ ID NO: 253, and a VL region comprising a CDR-L1 depicted in SEQ ID NO: 254, a CDR-L2 depicted in SEQ ID NO: 255 and a CDR-L3 as depicted in SEQ ID NO: 256, and
[0070] s) a VH region comprising a CDR-H1 depicted in SEQ ID NO: 265, a CDR-H2 depicted in SEQ ID NO: 266, and a CDR-H3 depicted in SEQ ID NO: 267, and a VL region comprising a CDR-L1 depicted in SEQ ID NO: 268, a CDR-L2 depicted in SEQ ID NO: 269, and a CDR-L3 as depicted in SEQ ID NO: 270.

[0071] Therefore, according to the invention, polypeptides/polypeptide constructs are provided, wherein
[0072] (i) a domain that binds (immunoselectively) to an epitope region that comprises amino acids of the first extracellular loop of CLDN6 (as depticed in SEQ ID NO: 1), also referred to as extracellular loop 1 (ECL1); said epitope region being depicted in SEQ ID NO: 9, and optionally comprises any one of the sequences referred to in a) to s) below, and/or
[0073] (ii) a domain that binds (immunoselectively) to an epitope region that comprises amino acids of the second extracellular loop of CLDN6 (as depticed in SEQ ID NO: 1), also referred to as extracellular loop 2 (ECL2); said epitope region being depicted in SEQ ID NO:10, and optionally comprises any one of the sequences referred to in a) to s) below; and/or
[0074] (iii) a domain that binds (immunoselectively) to an epitope region comprising amino acids of ECL1 and ECL2 of CLDN6, preferably those comprising amino acids of the epitope region comprising SEQ ID NOs: 9 and 10, and which optionally comprises any one of the structures referred to in a) to s) below; and/or
[0075] (iv) a domain that binds (immunoselectively) to the same epitope of CLDN6 as an antibody or polypeptide construct comprising a paratope which binds to CLDN6 on the surface of a target cell and which comprises any one of the sequences referred to in a) to s) below:
[0076] a) a VH region comprising a CDR-H1 depicted in SEQ ID NO: 13, a CDR-H2 depicted in SEQ ID NO: 14, and a CDR-H3 depicted in SEQ ID NO: 15, and a VL region comprising a CDR-L1 depicted in SEQ ID NO: 16, a CDR-L2 depicted in SEQ ID NO: 17 and a CDR-L3 depicted in SEQ ID NO: 18;
[0077] b) a VH region comprising a CDR-H1 depicted in SEQ ID NO: 27, a CDR-H2 depicted in SEQ ID NO: 28, and a CDR-H3 depicted in SEQ ID NO: 29, and a VL region comprising a CDR-L1 depicted in SEQ ID NO: 30, a CDR-L2 depicted in SEQ ID NO: 31 and a CDR-L3 depicted in SEQ ID NO: 32;
[0078] c) a VH region comprising a CDR-H1 depicted in SEQ ID NO: 41, a CDR-H2 depicted in SEQ ID NO: 42, and a CDR-H3 depicted in SEQ ID NO: 43, and a VL region comprising a CDR-L1 depicted in SEQ ID NO: 44, a CDR-L2 depicted in SEQ ID NO: 45 and a CDR-L3 depicted in SEQ ID NO: 46;
[0079] d) a VH region comprising a CDR-H1 depicted in SEQ ID NO: 55, a CDR-H2 depicted in SEQ ID NO: 56, and a CDR-H3 depicted in SEQ ID NO: 57, and a VL region comprising a CDR-L1 depicted in SEQ ID NO: 58, a CDR-L2 depicted in SEQ ID NO: 59 and a CDR-L3 depicted in SEQ ID NO: 60;
[0080] e) a VH region comprising a CDR-H1 depicted in SEQ ID NO: 69, a CDR-H2 depicted in SEQ ID NO: 70, and a CDR-H3 depicted in SEQ ID NO: 71, and a VL region comprising a CDR-L1 depicted in SEQ ID NO: 72, a CDR-L2 depicted in SEQ ID NO: 73 and a CDR-L3 depicted in SEQ ID NO: 74;
[0081] f) a VH region comprising a CDR-H1 depicted in SEQ ID NO: 83, a CDR-H2 depicted in SEQ ID NO: 84, and a CDR-H3 depicted in SEQ ID NO: 85, and a VL region comprising a CDR-L1 depicted in SEQ ID NO: 86, a CDR-L2 depicted in SEQ ID NO: 87 and a CDR-L3 depicted in SEQ ID NO: 88;
[0082] g) a VH region comprising a CDR-H1 depicted in SEQ ID NO: 97, a CDR-H2 depicted in SEQ ID NO: 98, and a CDR-H3 depicted in SEQ ID NO: 99, and a VL region comprising a CDR-L1 depicted in SEQ ID NO: 100, a CDR-L2 depicted in SEQ ID NO: 101 and a CDR-L3 depicted in SEQ ID NO: 102;
[0083] h) a VH region comprising a CDR-H1 depicted in SEQ ID NO: 111, a CDR-H2 depicted in SEQ ID NO: 112, and a CDR-H3 depicted in SEQ ID NO: 113, and a VL region comprising a CDR-L1 depicted in SEQ ID NO: 114, a CDR-L2 depicted in SEQ ID NO: 115 and a CDR-L3 depicted in SEQ ID NO: 116;
[0084] i) a VH region comprising a CDR-H1 depicted in SEQ ID NO: 125, a CDR-H2 depicted in SEQ ID NO: 126, and a CDR-H3 depicted in SEQ ID NO: 127, and a VL region comprising a CDR-L1 depicted in SEQ ID NO: 128, a CDR-L2 depicted in SEQ ID NO: 129 and a CDR-L3 depicted in SEQ ID NO: 130;
[0085] j) a VH region comprising a CDR-H1 depicted in SEQ ID NO: 139, a CDR-H2 depicted in SEQ ID NO: 140, and a CDR-H3 depicted in SEQ ID NO: 141, and a VL region comprising a CDR-L1 depicted in SEQ ID NO: 142, a CDR-L2 depicted in SEQ ID NO: 143 and a CDR-L3 depicted in SEQ ID NO: 144;
[0086] k) a VH region comprising a CDR-H1 depicted in SEQ ID NO: 153, a CDR-H2 depicted in SEQ ID NO: 154, and a CDR-H3 depicted in SEQ ID NO: 155, and a VL region comprising a CDR-L1 depicted in SEQ ID NO: 156, a CDR-L2 depicted in SEQ ID NO: 157 and a CDR-L3 depicted in SEQ ID NO: 158;
[0087] 1) a VH region comprising a CDR-H1 depicted in SEQ ID NO: 167, a CDR-H2 depicted in SEQ ID NO: 168, and a CDR-H3 depicted in SEQ ID NO: 169, and a VL region comprising a CDR-L1 depicted in SEQ ID NO: 170, a CDR-L2 depicted in SEQ ID NO: 171 and a CDR-L3 depicted in SEQ ID NO: 172;
[0088] m) a VH region comprising a CDR-H1 depicted in SEQ ID NO: 181, a CDR-H2 depicted in SEQ ID NO: 182, and a CDR-H3 depicted in SEQ ID NO: 183, and a VL region comprising a CDR-L1 depicted in SEQ ID NO: 184, a CDR-L2 depicted in SEQ ID NO: 185 and a CDR-L3 depicted in SEQ ID NO: 186;
[0089] n) a VH region comprising a CDR-H1 depicted in SEQ ID NO: 195, a CDR-H2 depicted in SEQ ID NO: 196, and a CDR-H3 depicted in SEQ ID NO: 197, and a VL region comprising a CDR-L1 depicted in SEQ ID NO: 198, a CDR-L2 depicted in SEQ ID NO: 199 and a CDR-L3 depicted in SEQ ID NO: 200;
[0090] o) a VH region comprising a CDR-H1 depicted in SEQ ID NO: 209, a CDR-H2 depicted in SEQ ID NO: 210, and a CDR-H3 depicted in SEQ ID NO: 211, and a VL region comprising a CDR-L1 depicted in SEQ ID NO: 212, a CDR-L2 depicted in SEQ ID NO: 213 and a CDR-L3 depicted in SEQ ID NO: 214;
[0091] p) a VH region comprising a CDR-H1 depicted in SEQ ID NO: 223, a CDR-H2 depicted in SEQ ID NO: 224, and a CDR-H3 depicted in SEQ ID NO: 225, and a VL region comprising a CDR-L1 depicted in SEQ ID NO: 226, a CDR-L2 depicted in SEQ ID NO: 227 and a CDR-L3 depicted in SEQ ID NO: 228;
[0092] q) a VH region comprising a CDR-H1 depicted in SEQ ID NO: 237, a CDR-H2 depicted in SEQ ID NO: 238, and a CDR-H3 depicted in SEQ ID NO: 239, and a VL region comprising a CDR-L1 depicted in SEQ ID NO: 240, a CDR-L2 depicted in SEQ ID NO: 241 and a CDR-L3 depicted in SEQ ID NO: 242;
[0093] r) a VH region comprising a CDR-H1 depicted in SEQ ID NO: 251, a CDR-H2 depicted in SEQ ID NO: 252, and a CDR-H3 depicted in SEQ ID NO: 253, and a VL region comprising a CDR-L1 depicted in SEQ ID NO: 254, a CDR-L2 depicted in SEQ ID NO: 255 and a CDR-L3 as depicted in SEQ ID NO: 256, and
[0094] s) a VH region comprising a CDR-H1 depicted in SEQ ID NO: 265, a CDR-H2 depicted in SEQ ID NO: 266, and a CDR-H3 depicted in SEQ ID NO: 267, and a VL region comprising a CDR-L1 depicted in SEQ ID NO: 268, a CDR-L2 depicted in SEQ ID NO: 269, and a CDR-L3 as depicted in SEQ ID NO: 270.

[0095] According to the invention, polypeptides/polypeptide constructs are provided, wherein:
[0096] (i) a domain comprises a paratope (an antigen-binding (epitope-binding) structure)) that binds (immunoselectively) to an epitope region that comprises amino acids of the first extracellular loop of CLDN6 (as depticed in SEQ ID NO: 1), also referred to as extracellular loop 1 (ECL1); said epitope region being depicted in SEQ ID NO: 9, and optionally comprises any one of the sequences referred to in a-1) to s-1) below, and/or
[0097] (ii) a domain comprises a paratope (an antigen-binding (epitope-binding) structure)) that binds (immunoselectively) to an epitope region that comprises amino acids of the second extracellular loop of CLDN6 (as depticed in SEQ ID NO: 1), also referred to as extracellular loop 2 (ECL2); said epitope region being depicted in SEQ ID NO:10, and optionally comprises any one of the sequences referred to in a-1) to s-1) below; and/or
[0098] (iii) a domain comprises a paratope (an antigen-binding (epitope-binding) structure)) that binds (immunoselectively) to an epitope region comprising amino acids of ECL1 and ECL2 of CLDN6, preferably those comprising amino acids of the epitope region comprising SEQ ID NOs: 9 and 10, and which optionally comprises any one of the structures referred to in a-1) to s-1) below; and/or
[0099] (iv) a domain comprises a paratope (an antigen-binding (epitope-binding) structure)) that binds (immunoselectively) to the same epitope of CLDN6 as an antibody or polypeptide construct comprising a paratope which binds to CLDN6 on the surface of a target cell and which comprises any one of the sequences referred to in a-1) to s-1) below:
[0100] a-1) a VH region as depicted in SEQ ID NO: 11, and/or a VL region as depicted in SEQ ID NO: 12;
[0101] b-1) a VH region as depicted in SEQ ID NO: 25, and/or a VL region as depicted in SEQ ID NO: 26;
[0102] c-1) a VH region as depicted in SEQ ID NO: 39, and/or a VL region as depicted in SEQ ID NO: 40;
[0103] d-1) a VH region as depicted in SEQ ID NO: 53, and/or a VL region as depicted in SEQ ID NO: 54;
[0104] e-1) a VH region as depicted in SEQ ID NO: 67, and/or a VL region as depicted in SEQ ID NO: 68;
[0105] f-1) a VH region as depicted in SEQ ID NO: 81, and/or a VL region as depicted in SEQ ID NO: 82;
[0106] g-1) a VH region as depicted in SEQ ID NO: 95, and/or a VL region as depicted in SEQ ID NO: 96;
[0107] h-1) a VH region as depicted in SEQ ID NO: 109, and/or a VL region as depicted in SEQ ID NO: 110;
[0108] i-1) a VH region as depicted in SEQ ID NO: 123, and/or a VL region as depicted in SEQ ID NO: 124;
[0109] j-1) a VH region as depicted in SEQ ID NO: 137, and/or a VL region as depicted in SEQ ID NO: 138;
[0110] k-1) a VH region as depicted in SEQ ID NO: 151, and/or a VL region as depicted in SEQ ID NO: 152;
[0111] l-1) a VH region as depicted in SEQ ID NO: 165, and/or a VL region as depicted in SEQ ID NO: 166;
[0112] m-1) a VH region as depicted in SEQ ID NO: 179, and/or a VL region as depicted in SEQ ID NO: 180;
[0113] n-1) a VH region as depicted in SEQ ID NO: 193, and/or a VL region as depicted in SEQ ID NO: 194;
[0114] o-1) a VH region as depicted in SEQ ID NO: 207, and/or a VL region as depicted in SEQ ID NO: 208;
[0115] p-1) a VH region as depicted in SEQ ID NO: 221, and/or a VL region as depicted in SEQ ID NO: 222;
[0116] q-1) a VH region as depicted in SEQ ID NO: 235, and/or a VL region as depicted in SEQ ID NO: 236;
[0117] r-1) a VH region as depicted in SEQ ID NO: 249, and/or a VL region as depicted in SEQ ID NO: 250; and
[0118] s-1) a VH region as depicted in SEQ ID NO: 263, and/or a VL region as depicted in SEQ ID NO: 264.

[0119] Therefore, according to the invention, polypeptides/polypeptide constructs are provided, wherein:
[0120] (i) a domain that binds (immunoselectively) to an epitope region that comprises amino acids of the first extracellular loop of CLDN6 (as depticed in SEQ ID NO: 1), also referred to as extracellular loop 1 (ECL1); said epitope region being depicted in SEQ ID NO: 9, and optionally comprises any one of the sequences referred to in a-1) to s-1) below, and/or
[0121] (ii) a domain that binds (immunoselectively) to an epitope region that comprises amino acids of the second extracellular loop of CLDN6 (as depticed in SEQ ID NO: 1), also referred to as extracellular loop 2 (ECL2); said epitope region being depicted in SEQ ID NO:10, and optionally comprises any one of the sequences referred to in a-1) to s-1) below; and/or
[0122] (iii) a domain that binds (immunoselectively) to an epitope region comprising amino acids of ECL1 and ECL2 of CLDN6, preferably those comprising amino acids of the epitope region comprising SEQ ID NOs: 9 and 10, and which optionally comprises any one of the structures referred to in a-1) to s-1) below; and/or
[0123] (iv) a domain that binds (immunoselectively) to the same epitope of CLDN6 as an antibody or polypeptide construct comprising a paratope which binds to CLDN6 on the surface of a target cell and which comprises any one of the sequences referred to in a-1) to s-1) below:
[0124] a-1) a VH region as depicted in SEQ ID NO: 11, and/or a VL region as depicted in SEQ ID NO: 12;
[0125] b-1) a VH region as depicted in SEQ ID NO: 25, and/or a VL region as depicted in SEQ ID NO: 26;
[0126] c-1) a VH region as depicted in SEQ ID NO: 39, and/or a VL region as depicted in SEQ ID NO: 40;
[0127] d-1) a VH region as depicted in SEQ ID NO: 53, and/or a VL region as depicted in SEQ ID NO: 54;
[0128] e-1) a VH region as depicted in SEQ ID NO: 67, and/or a VL region as depicted in SEQ ID NO: 68;
[0129] f-1) a VH region as depicted in SEQ ID NO: 81, and/or a VL region as depicted in SEQ ID NO: 82;
[0130] g-1) a VH region as depicted in SEQ ID NO: 95, and/or a VL region as depicted in SEQ ID NO: 96;
[0131] h-1) a VH region as depicted in SEQ ID NO: 109, and/or a VL region as depicted in SEQ ID NO: 110;
[0132] i-1) a VH region as depicted in SEQ ID NO: 123, and/or a VL region as depicted in SEQ ID NO: 124;
[0133] j-1) a VH region as depicted in SEQ ID NO: 137, and/or a VL region as depicted in SEQ ID NO: 138;
[0134] k-1) a VH region as depicted in SEQ ID NO: 151, and/or a VL region as depicted in SEQ ID NO: 152;
[0135] l-1) a VH region as depicted in SEQ ID NO: 165, and/or a VL region as depicted in SEQ ID NO: 166;
[0136] m-1) a VH region as depicted in SEQ ID NO: 179, and/or a VL region as depicted in SEQ ID NO: 180;
[0137] n-1) a VH region as depicted in SEQ ID NO: 193, and/or a VL region as depicted in SEQ ID NO: 194;
[0138] o-1) a VH region as depicted in SEQ ID NO: 207, and/or a VL region as depicted in SEQ ID NO: 208;
[0139] p-1) a VH region as depicted in SEQ ID NO: 221, and/or a VL region as depicted in SEQ ID NO: 222;
[0140] q-1) a VH region as depicted in SEQ ID NO: 235, and/or a VL region as depicted in SEQ ID NO: 236;
[0141] r-1) a VH region as depicted in SEQ ID NO: 249, and/or a VL region as depicted in SEQ ID NO: 250; and
[0142] s-1) a VH region as depicted in SEQ ID NO: 263, and/or a VL region as depicted in SEQ ID NO: 264.

[0143] According to the invention, polypeptides/polypeptide constructs are provided that compete for binding with a polypeptide construct comprising, or consisting of, a domain:
[0144] (i) a domain comprises a paratope (an antigen-binding (epitope-binding) structure)) that binds (immunoselectively) to an epitope region that comprises amino acids of the first extracellular loop of CLDN6 (as depticed in SEQ ID NO: 1), also referred to as extracellular loop 1 (ECL1); said epitope region being depicted in SEQ ID NO: 9, and optionally comprises any one of the sequences referred to in a-1) to s-1) below, and/or
[0145] (ii) a domain comprises a paratope (an antigen-binding (epitope-binding) structure)) that binds (immunoselectively) to an epitope region that comprises amino acids of the second extracellular loop of CLDN6 (as depticed in SEQ ID NO: 1), also referred to as extracellular loop 2 (ECL2); said epitope region being depicted in SEQ ID NO:10, and optionally comprises any one of the sequences referred to in a-1) to s-1) below; and/or
[0146] (iii) a domain comprises a paratope (an antigen-binding (epitope-binding) structure)) that binds (immunoselectively) to an epitope region comprising amino acids of ECL1 and ECL2 of CLDN6, preferably those comprising amino acids of the epitope region comprising SEQ ID NOs: 9 and 10, and which optionally comprises any one of the structures referred to in a-1) to s-1) below; and/or
[0147] (iv) a domain comprises a paratope (an antigen-binding (epitope-binding) structure)) that binds (immunoselectively) to the same epitope of CLDN6 as an antibody or polypeptide construct comprising a paratope which binds to CLDN6 on the surface of a target cell and which comprises any one of the sequences referred to in a-1) to s-1) below:
[0148] a-1) a VH region as depicted in SEQ ID NO: 11, and/or a VL region as depicted in SEQ ID NO: 12;
[0149] b-1) a VH region as depicted in SEQ ID NO: 25, and/or a VL region as depicted in SEQ ID NO: 26;
[0150] c-1) a VH region as depicted in SEQ ID NO: 39, and/or a VL region as depicted in SEQ ID NO: 40;
[0151] d-1) a VH region as depicted in SEQ ID NO: 53, and/or a VL region as depicted in SEQ ID NO: 54;
[0152] e-1) a VH region as depicted in SEQ ID NO: 67, and/or a VL region as depicted in SEQ ID NO: 68;
[0153] f-1) a VH region as depicted in SEQ ID NO: 81, and/or a VL region as depicted in SEQ ID NO: 82;
[0154] g-1) a VH region as depicted in SEQ ID NO: 95, and/or a VL region as depicted in SEQ ID NO: 96;
[0155] h-1) a VH region as depicted in SEQ ID NO: 109, and/or a VL region as depicted in SEQ ID NO: 110;
[0156] i-1) a VH region as depicted in SEQ ID NO: 123, and/or a VL region as depicted in SEQ ID NO: 124;
[0157] j-1) a VH region as depicted in SEQ ID NO: 137, and/or a VL region as depicted in SEQ ID NO: 138;
[0158] k-1) a VH region as depicted in SEQ ID NO: 151, and/or a VL region as depicted in SEQ ID NO: 152;
[0159] l-1) a VH region as depicted in SEQ ID NO: 165, and/or a VL region as depicted in SEQ ID NO: 166;
[0160] m-1) a VH region as depicted in SEQ ID NO: 179, and/or a VL region as depicted in SEQ ID NO: 180;
[0161] n-1) a VH region as depicted in SEQ ID NO: 193, and/or a VL region as depicted in SEQ ID NO: 194;
[0162] o-1) a VH region as depicted in SEQ ID NO: 207, and/or a VL region as depicted in SEQ ID NO: 208;
[0163] p-1) a VH region as depicted in SEQ ID NO: 221, and/or a VL region as depicted in SEQ ID NO: 222;
[0164] q-1) a VH region as depicted in SEQ ID NO: 235, and/or a VL region as depicted in SEQ ID NO: 236;
[0165] r-1) a VH region as depicted in SEQ ID NO: 249, and/or a VL region as depicted in SEQ ID NO: 250; and
[0166] s-1) a VH region as depicted in SEQ ID NO: 263, and/or a VL region as depicted in SEQ ID NO: 264.

[0167] Therefore, according to the invention, polypeptides/polypeptide constructs are provided that compete for binding with a polypeptide construct comprising, or consisting of, a domain:
[0168] (i) a domain that binds (immunoselectively) to an epitope region that comprises amino acids of the first extracellular loop of CLDN6 (as depticed in SEQ ID NO: 1), also referred to as extracellular loop 1 (ECL1); said epitope region being depicted in SEQ ID NO: 9, and optionally comprises any one of the sequences referred to in a-1) to s-1) below, and/or
[0169] (ii) a domain that binds (immunoselectively) to an epitope region that comprises amino acids of the second extracellular loop of CLDN6 (as depticed in SEQ ID NO: 1), also referred to as extracellular loop 2 (ECL2); said epitope region being depicted in SEQ ID NO:10, and optionally comprises any one of the sequences referred to in a-1) to s-1) below; and/or (iii) a domain that binds (immunoselectively) to an epitope region comprising amino acids of ECL1 and ECL2 of CLDN6, preferably those comprising amino acids of the epitope region comprising SEQ ID NOs: 9 and 10, and which optionally comprises any one of the structures referred to in a-1) to s-1) below; and/or
[0170] (iv) a domain that binds (immunoselectively) to the same epitope of CLDN6 as an antibody or polypeptide construct comprising a paratope which binds to CLDN6 on the surface of a target cell and which comprises any one of the sequences referred to in a-1) to s-1) below:
[0171] a-1) a VH region as depicted in SEQ ID NO: 11, and/or a VL region as depicted in SEQ ID NO: 12;
[0172] b-1) a VH region as depicted in SEQ ID NO: 25, and/or a VL region as depicted in SEQ ID NO: 26;
[0173] c-1) a VH region as depicted in SEQ ID NO: 39, and/or a VL region as depicted in SEQ ID NO: 40;
[0174] d-1) a VH region as depicted in SEQ ID NO: 53, and/or a VL region as depicted in SEQ ID NO: 54;
[0175] e-1) a VH region as depicted in SEQ ID NO: 67, and/or a VL region as depicted in SEQ ID NO: 68;
[0176] f-1) a VH region as depicted in SEQ ID NO: 81, and/or a VL region as depicted in SEQ ID NO: 82;
[0177] g-1) a VH region as depicted in SEQ ID NO: 95, and/or a VL region as depicted in SEQ ID NO: 96;
[0178] h-1) a VH region as depicted in SEQ ID NO: 109, and/or a VL region as depicted in SEQ ID NO: 110;
[0179] i-1) a VH region as depicted in SEQ ID NO: 123, and/or a VL region as depicted in SEQ ID NO: 124;
[0180] j-1) a VH region as depicted in SEQ ID NO: 137, and/or a VL region as depicted in SEQ ID NO: 138;
[0181] k-1) a VH region as depicted in SEQ ID NO: 151, and/or a VL region as depicted in SEQ ID NO: 152;
[0182] l-1) a VH region as depicted in SEQ ID NO: 165, and/or a VL region as depicted in SEQ ID NO: 166;
[0183] m-1) a VH region as depicted in SEQ ID NO: 179, and/or a VL region as depicted in SEQ ID NO: 180;
[0184] n-1) a VH region as depicted in SEQ ID NO: 193, and/or a VL region as depicted in SEQ ID NO: 194;
[0185] o-1) a VH region as depicted in SEQ ID NO: 207, and/or a VL region as depicted in SEQ ID NO: 208;
[0186] p-1) a VH region as depicted in SEQ ID NO: 221, and/or a VL region as depicted in SEQ ID NO: 222;
[0187] q-1) a VH region as depicted in SEQ ID NO: 235, and/or a VL region as depicted in SEQ ID NO: 236;
[0188] r-1) a VH region as depicted in SEQ ID NO: 249, and/or a VL region as depicted in SEQ ID NO: 250; and
[0189] s-1) a VH region as depicted in SEQ ID NO: 263, and/or a VL region as depicted in SEQ ID NO: 264.

[0190] Further, the polypeptide construct of the invention competes for binding with a construct comprising a domain which selectively binds to CLDN6 on the surface of a target cell and which comprises any one of the group of sequences referred to in in a) to s) below, a) to d), n) and s) being preferred, a) to c), e) and s) being particularly preferred), and, a polypeptide construct of the invention competes for binding with a construct comprising a domain comprising a paratope (i.e., an antigen-binding (epitope-binding) structure) which selectively binds to CLDN6 on the surface of a target cell and which comprises any one of the group of sequences referred to in in a) to s) below, a) to d), n) and s) being preferred, a) to c), e) and s) being particularly preferred):
[0191] a) a VH region comprising a CDR-H1 depicted in SEQ ID NO: 13, a CDR-H2 depicted in SEQ ID NO: 14, and a CDR-H3 depicted in SEQ ID NO: 15, and a VL region comprising a CDR-L1 depicted in SEQ ID NO: 16, a CDR-L2 depicted in SEQ ID NO: 17 and a CDR-L3 depicted in SEQ ID NO: 18;
[0192] b) a VH region comprising a CDR-H1 depicted in SEQ ID NO: 27, a CDR-H2 depicted in SEQ ID NO: 28, and a CDR-H3 depicted in SEQ ID NO: 29, and a VL region comprising a CDR-L1 depicted in SEQ ID NO: 30, a CDR-L2 depicted in SEQ ID NO: 31 and a CDR-L3 depicted in SEQ ID NO: 32;
[0193] c) a VH region comprising a CDR-H1 depicted in SEQ ID NO: 41, a CDR-H2 depicted in SEQ ID NO: 42, and a CDR-H3 depicted in SEQ ID NO: 43, and a VL region comprising a CDR-L1 depicted in SEQ ID NO: 44, a CDR-L2 depicted in SEQ ID NO: 45 and a CDR-L3 depicted in SEQ ID NO: 46;
[0194] d) a VH region comprising a CDR-H1 depicted in SEQ ID NO: 55, a CDR-H2 depicted in SEQ ID NO: 56, and a CDR-H3 depicted in SEQ ID NO: 57, and a VL region comprising a CDR-L1 depicted in SEQ ID NO: 58, a CDR-L2 depicted in SEQ ID NO: 59 and a CDR-L3 depicted in SEQ ID NO: 60;
[0195] e) a VH region comprising a CDR-H1 depicted in SEQ ID NO: 69, a CDR-H2 depicted in SEQ ID NO: 70, and a CDR-H3 depicted in SEQ ID NO: 71, and a VL region comprising a CDR-L1 depicted in SEQ ID NO: 72, a CDR-L2 depicted in SEQ ID NO: 73 and a CDR-L3 depicted in SEQ ID NO: 74;
[0196] f) a VH region comprising a CDR-H1 depicted in SEQ ID NO: 83, a CDR-H2 depicted in SEQ ID NO: 84, and a CDR-H3 depicted in SEQ ID NO: 85, and a VL region comprising a CDR-L1 depicted in SEQ ID NO: 86, a CDR-L2 depicted in SEQ ID NO: 87 and a CDR-L3 depicted in SEQ ID NO: 88;
[0197] g) a VH region comprising a CDR-H1 depicted in SEQ ID NO: 97, a CDR-H2 depicted in SEQ ID NO: 98, and a CDR-H3 depicted in SEQ ID NO: 99, and a VL region comprising a CDR-L1 depicted in SEQ ID NO: 100, a CDR-L2 depicted in SEQ ID NO: 101 and a CDR-L3 depicted in SEQ ID NO: 102;
[0198] h) a VH region comprising a CDR-H1 depicted in SEQ ID NO: 111, a CDR-H2 depicted in SEQ ID NO: 112, and a CDR-H3 depicted in SEQ ID NO: 113, and a VL region comprising a CDR-L1 depicted in SEQ ID NO: 114, a CDR-L2 depicted in SEQ ID NO: 115 and a CDR-L3 depicted in SEQ ID NO: 116;
[0199] i) a VH region comprising a CDR-H1 depicted in SEQ ID NO: 125, a CDR-H2 depicted in SEQ ID NO: 126, and a CDR-H3 depicted in SEQ ID NO: 127, and a VL region comprising a CDR-L1 depicted in SEQ ID NO: 128, a CDR-L2 depicted in SEQ ID NO: 129 and a CDR-L3 depicted in SEQ ID NO: 130;
[0200] j) a VH region comprising a CDR-H1 depicted in SEQ ID NO: 139, a CDR-H2 depicted in SEQ ID NO: 140, and a CDR-H3 depicted in SEQ ID NO: 141, and a VL region comprising a CDR-L1 depicted in SEQ ID NO: 142, a CDR-L2 depicted in SEQ ID NO: 143 and a CDR-L3 depicted in SEQ ID NO: 144;
[0201] k) a VH region comprising a CDR-H1 depicted in SEQ ID NO: 153, a CDR-H2 depicted in SEQ ID NO: 154, and a CDR-H3 depicted in SEQ ID NO: 155, and a VL region comprising a CDR-L1 depicted in SEQ ID NO: 156, a CDR-L2 depicted in SEQ ID NO: 157 and a CDR-L3 depicted in SEQ ID NO: 158;
[0202] l) a VH region comprising a CDR-H1 depicted in SEQ ID NO: 167, a CDR-H2 depicted in SEQ ID NO: 168, and a CDR-H3 depicted in SEQ ID NO: 169, and a VL region comprising a CDR-L1 depicted in SEQ ID NO: 170, a CDR-L2 depicted in SEQ ID NO: 171 and a CDR-L3 depicted in SEQ ID NO: 172;
[0203] m) a VH region comprising a CDR-H1 depicted in SEQ ID NO: 181, a CDR-H2 depicted in SEQ ID NO: 182, and a CDR-H3 depicted in SEQ ID NO: 183, and a VL region comprising a CDR-L1 depicted in SEQ ID NO: 184, a CDR-L2 depicted in SEQ ID NO: 185 and a CDR-L3 depicted in SEQ ID NO: 186;
[0204] n) a VH region comprising a CDR-H1 depicted in SEQ ID NO: 195, a CDR-H2 depicted in SEQ ID NO: 196, and a CDR-H3 depicted in SEQ ID NO: 197, and a VL region comprising a CDR-L1 depicted in SEQ ID NO: 198, a CDR-L2 depicted in SEQ ID NO: 199 and a CDR-L3 depicted in SEQ ID NO: 200;
[0205] o) a VH region comprising a CDR-H1 depicted in SEQ ID NO: 209, a CDR-H2 depicted in SEQ ID NO: 210, and a CDR-H3 depicted in SEQ ID NO: 211, and a VL region comprising a CDR-L1 depicted in SEQ ID NO: 212, a CDR-L2 depicted in SEQ ID NO: 213 and a CDR-L3 depicted in SEQ ID NO: 214;
[0206] p) a VH region comprising a CDR-H1 depicted in SEQ ID NO: 223, a CDR-H2 depicted in SEQ ID NO: 224, and a CDR-H3 depicted in SEQ ID NO: 225, and a VL region comprising a CDR-L1 depicted in SEQ ID NO: 226, a CDR-L2 depicted in SEQ ID NO: 227 and a CDR-L3 depicted in SEQ ID NO: 228;
[0207] q) a VH region comprising a CDR-H1 depicted in SEQ ID NO: 237, a CDR-H2 depicted in SEQ ID NO: 238, and a CDR-H3 depicted in SEQ ID NO: 239, and a VL region comprising a CDR-L1 depicted in SEQ ID NO: 240, a CDR-L2 depicted in SEQ ID NO: 241 and a CDR-L3 depicted in SEQ ID NO: 242;
[0208] r) a VH region comprising a CDR-H1 depicted in SEQ ID NO: 251, a CDR-H2 depicted in SEQ ID NO: 252, and a CDR-H3 depicted in SEQ ID NO: 253, and a VL region comprising a CDR-L1 depicted in SEQ ID NO: 254, a CDR-L2 depicted in SEQ ID NO: 255 and a CDR-L3 as depicted in SEQ ID NO: 256, and
[0209] s) a VH region comprising a CDR-H1 depicted in SEQ ID NO: 265, a CDR-H2 depicted in SEQ ID NO: 266, and a CDR-H3 depicted in SEQ ID NO: 267, and a VL region comprising a CDR-L1 depicted in SEQ ID NO: 268, a CDR-L2 depicted in SEQ ID NO: 269, and a CDR-L3 as depicted in SEQ ID NO: 270.

[0210] Further, the polypeptide construct of the invention binds to or competes for binding with an antibody or a polypeptide construct comprising a paratope (i.e., an antigen-binding or epitope-binding structure), which (immunoselectively) binds to CLDN6 on the surface of a target cell and which comprises any one of the group of sequences, and a polypeptide construct of the invention binds to or competes for binding with an antibody or a polypeptide construct which (immunoselectively) binds to CLDN6 on the surface of a target cell and which comprises any one of the group of sequences:
[0211] a-1) a VH region as depicted in SEQ ID NO: 11, and/or a VL region as depicted in SEQ ID NO: 12;
[0212] b-1) a VH region as depicted in SEQ ID NO: 25, and/or a VL region as depicted in SEQ ID NO: 26;
[0213] c-1) a VH region as depicted in SEQ ID NO: 39, and/or a VL region as depicted in SEQ ID NO: 40;
[0214] d-1) a VH region as depicted in SEQ ID NO: 53, and/or a VL region as depicted in SEQ ID NO: 54;
[0215] e-1) a VH region as depicted in SEQ ID NO: 67, and/or a VL region as depicted in SEQ ID NO: 68;
[0216] f-1) a VH region as depicted in SEQ ID NO: 81, and/or a VL region as depicted in SEQ ID NO: 82;
[0217] g-1) a VH region as depicted in SEQ ID NO: 95, and/or a VL region as depicted in SEQ ID NO: 96;
[0218] h-1) a VH region as depicted in SEQ ID NO: 109, and/or a VL region as depicted in SEQ ID NO: 110;
[0219] i-1) a VH region as depicted in SEQ ID NO: 123, and/or a VL region as depicted in SEQ ID NO: 124;
[0220] j-1) a VH region as depicted in SEQ ID NO: 137, and/or a VL region as depicted in SEQ ID NO: 138;
[0221] k-1) a VH region as depicted in SEQ ID NO: 151, and/or a VL region as depicted in SEQ ID NO: 152;
[0222] l-1) a VH region as depicted in SEQ ID NO: 165, and/or a VL region as depicted in SEQ ID NO: 166;
[0223] m-1) a VH region as depicted in SEQ ID NO: 179, and/or a VL region as depicted in SEQ ID NO: 180;
[0224] n-1) a VH region as depicted in SEQ ID NO: 193, and/or a VL region as depicted in SEQ ID NO: 194;
[0225] o-1) a VH region as depicted in SEQ ID NO: 207, and/or a VL region as depicted in SEQ ID NO: 208;
[0226] p-1) a VH region as depicted in SEQ ID NO: 221, and/or a VL region as depicted in SEQ ID NO: 222;
[0227] q-1) a VH region as depicted in SEQ ID NO: 235, and/or a VL region as depicted in SEQ ID NO: 236;
[0228] r-1) a VH region as depicted in SEQ ID NO: 249, and/or a VL region as depicted in SEQ ID NO: 250; and
[0229] s-1) a VH region as depicted in SEQ ID NO: 263, and/or a VL region as depicted in SEQ ID NO: 264.

[0230] The invention relates to polypeptides/polypeptide constructs according to any one of the preceding paragraphs, wherein the paratope (i.e., the antigen-binding (epitope-binding) structure) binding to CLDN6 is comprised by a pair of VH and VL regions, and polypeptides/polypeptide constructs according to any one of the preceding paragraphs, wherein the domain binding to CLDN6 is comprised by a pair of VH and VL regions, comprising amino acid sequences depicted in comprising amino acid sequences depicted in SEQ ID NOs: 11+12, SEQ ID NO: 25+26, SEQ ID NO: 39+40, SEQ ID NO: 53+54, SEQ ID NO: 67+68, SEQ ID NO: 81+82, SEQ ID NO: 95+96, SEQ ID NO: 109+110, SEQ ID NO: 123+124, SEQ ID NO: 137+138, SEQ ID NO: 151+152, SEQ ID NO: 165+166, SEQ ID NO: 179+180, SEQ ID NO: 193+194, SEQ ID NO: 207+208, SEQ ID NO: 221+222, SEQ ID NO: 235+236, SEQ ID NO: 249+250, or SEQ ID NO: 263+264, or which compete with the polypeptide construct binding to CLDN6.

[0231] The invention relates to polypeptides/polypeptide constructs according to any one of the preceding paragraphs comprising or consisting of an amino acid sequence as depicted in SEQ ID NO: 19, SEQ ID NO: 22, SEQ ID NO: 33, SEQ ID NO: 36, SEQ ID NO: 47, SEQ ID NO: 50, SEQ ID NO: 61, SEQ ID NO: 64, SEQ ID NO: 75, SEQ ID NO: 78, SEQ ID NO: 89, SEQ ID NO: 92, SEQ ID NO: 103, SEQ ID NO: 106, SEQ ID NO: 117, SEQ ID NO: 120, SEQ ID NO: 131, SEQ ID NO: 134, SEQ ID NO: 145, SEQ ID NO: 148, SEQ ID NO: 159, SEQ ID NO: 162, SEQ ID NO: 173, SEQ ID NO: 176, SEQ ID NO: 187, SEQ ID NO: 190, SEQ ID NO: 201, SEQ ID NO: 204, SEQ ID NO: 215, SEQ ID NO: 218, SEQ ID NO: 229, SEQ ID NO: 232, SEQ ID NO: 243, SEQ ID NO: 246, SEQ ID NO: 257, or SEQ ID NO: 260, SEQ ID NO: 271 or SEQ ID NO: 274, or which compete with the polypeptide construct binding to CLDN6.

[0232] The invention relates to polypeptides/polypeptide constructs according to any one of the preceding paragraphs comprising or consisting of an amino acid sequence selected from the group of those depicted in:
[0233] SEQ ID NO: 19, SEQ ID NO: 20, SEQ ID NO: 21, SEQ ID NO: 22, SEQ ID NO: 23, and SEQ ID NO: 24,
[0234] SEQ ID NO: 33, SEQ ID NO: 34, SEQ ID NO: 35, SEQ ID NO: 36, SEQ ID NO: 37, and SEQ ID NO: 38,
[0235] SEQ ID NO: 47, SEQ ID NO: 48, SEQ ID NO: 49, SEQ ID NO: 50, SEQ ID NO: 51, and SEQ ID NO: 52,
[0236] SEQ ID NO: 61, SEQ ID NO: 62, SEQ ID NO: 63, SEQ ID NO: 64, SEQ ID NO: 65, and SEQ ID NO: 66,
[0237] SEQ ID NO: 75, SEQ ID NO: 76, SEQ ID NO: 77, SEQ ID NO: 78, SEQ ID NO: 79, and SEQ ID NO: 80,
[0238] SEQ ID NO: 89, SEQ ID NO: 90, SEQ ID NO: 91, SEQ ID NO: 92, SEQ ID NO: 93, and SEQ ID NO: 94,
[0239] SEQ ID NO: 103, SEQ ID NO: 104, SEQ ID NO: 105, SEQ ID NO: 106, SEQ ID NO: 107, and SEQ ID NO: 108,
[0240] SEQ ID NO: 117, SEQ ID NO: 118, SEQ ID NO: 119, SEQ ID NO: 120, SEQ ID NO: 121, and SEQ ID NO: 122,
[0241] SEQ ID NO: 131, SEQ ID NO: 132, SEQ ID NO: 133, SEQ ID NO: 134, SEQ ID NO: 135, and SEQ ID NO: 136,
[0242] SEQ ID NO: 145, SEQ ID NO: 146, SEQ ID NO: 147, SEQ ID NO: 148, SEQ ID NO: 149, and SEQ ID NO: 150,
[0243] SEQ ID NO: 159, SEQ ID NO: 160, SEQ ID NO: 161, SEQ ID NO: 162, SEQ ID NO: 163, and SEQ ID NO: 164,
[0244] SEQ ID NO: 173, SEQ ID NO: 174, SEQ ID NO: 175, SEQ ID NO: 176, SEQ ID NO: 177, and SEQ ID NO: 178,
[0245] SEQ ID NO: 187, SEQ ID NO: 188, SEQ ID NO: 189, SEQ ID NO: 190, SEQ ID NO: 191, and SEQ ID NO: 192,
[0246] SEQ ID NO: 201, SEQ ID NO: 202, SEQ ID NO: 203, SEQ ID NO: 204, SEQ ID NO: 205, and SEQ ID NO: 206,
[0247] SEQ ID NO: 215, SEQ ID NO: 216, SEQ ID NO: 217, SEQ ID NO: 218, SEQ ID NO: 219, and SEQ ID NO: 220,
[0248] SEQ ID NO: 229, SEQ ID NO: 230, SEQ ID NO: 231, SEQ ID NO: 232, SEQ ID NO: 233, and SEQ ID NO: 234,
[0249] SEQ ID NO: 243, SEQ ID NO: 244, SEQ ID NO: 245, SEQ ID NO: 246, SEQ ID NO: 247, and SEQ ID NO: 248,
[0250] SEQ ID NO: 257, SEQ ID NO: 258, SEQ ID NO: 259, SEQ ID NO: 260, SEQ ID NO: 261, and SEQ ID NO: 262, and
[0251] SEQ ID NO: 271, SEQ ID NO: 272, SEQ ID NO: 273, SEQ ID NO: 274, SEQ ID NO: 275, and SEQ ID NO: 276, or a polypeptide construct which competes with the binding to CLDN6.

[0252] The invention relates to polypeptides/polypeptide constructs according to any one of the preceding paragraphs comprising or consisting of the amino acid depicted in SEQ ID NO: 21.

[0253] The invention relates to polypeptides/polypeptide constructs according to any one of the preceding paragraphs comprising or consisting of the amino acid depicted in SEQ ID NO: 24.

[0254] The invention relates to polypeptides/polypeptide constructs according to any one of the preceding paragraphs comprising or consisting of the amino acid depicted in SEQ ID NO: 35.

[0255] The invention relates to polypeptides/polypeptide constructs according to any one of the preceding paragraphs comprising or consisting of the amino acid depicted in SEQ ID NO: 38.

[0256] The invention relates to polypeptides/polypeptide constructs according to any one of the preceding paragraphs comprising or consisting of the amino acid depicted in SEQ ID NO: 49.

[0257] The invention relates to polypeptides/polypeptide constructs according to any one of the preceding paragraphs comprising or consisting of the amino acid depicted in SEQ ID NO: 52.

[0258] The invention relates to polypeptides/polypeptide constructs according to any one of the preceding paragraphs comprising or consisting of the amino acid depicted in SEQ ID NO: 63.

[0259] The invention relates to polypeptides/polypeptide constructs according to any one of the preceding paragraphs comprising or consisting of the amino acid depicted in SEQ ID NO: 66.

[0260] The invention relates to polypeptides/polypeptide constructs according to any one of the preceding paragraphs comprising or consisting of the amino acid depicted in SEQ ID NO: 77.

[0261] The invention relates to polypeptides/polypeptide constructs according to any one of the preceding paragraphs comprising or consisting of the amino acid depicted in SEQ ID NO: 80.

[0262] The invention relates to polypeptides/polypeptide constructs according to any one of the preceding paragraphs comprising or consisting of the amino acid depicted in SEQ ID NO: 234.

[0263] The invention relates to polypeptides/polypeptide constructs according to any one of the preceding paragraphs comprising or consisting of the amino acid depicted in SEQ ID NO: 276.

[0264] The polypeptide/polypeptide construct according to any one of the preceding embodiments, wherein the polypeptide/polypeptide construct induces at least 100 fold, at least 250 fold, at least 500 fold lower cytotoxicity, or at least 1000 fold lower T cell-dependent cytotoxicity as determined in an in vitro assay using a cell that expresses a mutant of wild-type CLDN6 as depicted in SEQ ID NO: 1 that comprises at least one or more of the following mutations M29X, wherein X is preferably L, R145X, wherein X is preferably Q, and/or Q156X, wherein X is preferably L, as compared with the T cell-dependent cytotoxicity measured in the in vitro assay using a cell that expresses CLDN6 as depicted in SEQ ID NO: 1.

[0265] According to the invention, polypeptides/polypeptide constructs are provided,
[0266] wherein a domain (comprising a paratope, i.e., an antigen-binding (epitope-binding) structure)) of the polypeptide construct of the invention is capable of binding and discriminating CLDN6 on the surface of a cell that expresses CLDN6 as depicted in SEQ ID NO: 1 and a CLDN6 mutant on the surface of a cell that expresses said CLDN6 mutant, wherein said CLDN6 mutant comprises the sequence depicted in SEQ ID NO: 1, in which at least one of residues 31, 38, and 39 is replaced by another amino acid residue, particularly, wherein residue 31 is R and/or residue 38 is S and/or residue 39 is N, and/or wherein at least one of residues 31, 38, and 39 is replaced by another amino acid residue, particularly, wherein residue 156 is not Q,
[0267] wherein optionally a domain (comprising a paratope (i.e., an antigen-binding (epitope-binding) structure)) of the polypeptide construct of the invention binds CD3 (particularly human or non-human primate CD3),
[0268] wherein said polypeptides/polypeptide constructs are capable of engaging, activating T cells and inducing T cell-dependent cytotoxicity when it (a paratope (i.e., an antigen-binding (epitope-binding) structure)) binds to CLDN6 on the surface of a cell that expresses CLDN6 and when a further antigen-binding (epitope-binding) domain comprises a paratope that binds to CD3, and
[0269] wherein a domain (comprising a paratope (i.e., an antigen-binding (epitope-binding) structure)) that binds CLDN6 comprises a heavy chain CDR3 region comprising the sequence: X1LIVX2APX3 (SEQ ID NO. 667), wherein X1 is either A or N; X2 is either V or E; and X3 is either V or A,
[0270] wherein optionally the polypeptide construct does not selectively bind to CLDN1, CLDN2, CLDN3, CLDN4, CLDN9, and/or CLDN18.1,
[0271] wherein preferably the polypeptides/polypeptide constructs binds to the E1A and/or the E2B regions of CLDN6 (SEQ ID NO: 1) as depicted in SEQ ID NOs: 9 and 10, and wherein preferably the polypeptides/polypeptide constructs do not bind to an epitope comprising amino acids 138-150 of CLDN6 (SEQ ID NO: 1).

[0272] According to the invention, polypeptides/polypeptide constructs are provided, wherein a domain (comprising a paratope (i.e., an antigen-binding (epitope-binding) structure)) of the polypeptide construct of the invention is capable of binding and discriminating CLDN6 on the surface of a cell that expresses CLDN6 as depicted in SEQ ID NO: 1 and a CLDN6 mutant on the surface of a cell that expresses said CLDN6 mutant, wherein said CLDN6 mutant comprises the sequence as depicted in SEQ ID NO: 1 in which at least one of residues 31, 38, and 39 is replaced by another amino acid residue, particularly, wherein residue 31 is R and/or residue 38 is S and/or residue 39 is N,
[0273] wherein optionally a domain (comprising a paratope (i.e., an antigen-binding (epitope-binding) structure)) of the construct of the invention binds CD3 (particularly human or non-human primate CD3),
[0274] further wherein said polypeptides/polypeptide constructs are capable of engaging, activating T cells and inducing T cell-dependent cytotoxicity when it (e.g., a paratope (i.e., an antigen-binding (epitope-binding) structure)) binds to CLDN6 on the surface of a cell that expresses CLDN6 and when a further antigen-binding (epitope-binding) domain (comprises a paratope) that binds to CD3, and
[0275] wherein the domain (comprising a paratope (i.e., an antigen-binding (epitope-binding) structure)) that binds CLDN6 comprises a heavy chain CDR3 region comprising the sequence: DX1LIVX2APX3T (SEQ ID NO. 668), wherein X1 is either A or N; X2 is either V or E; and X3 is either V or A,
[0276] wherein optionally the domain (comprises a paratope (i.e., an antigen-binding (epitope-binding) structure)) that does not immunospecifically or immunoselectively bind to CLDN1, CLDN2, CLDN3, CLDN4, CLDN9, and/or CLDN18.1,
[0277] wherein optionally the domain (comprising a paratope (i.e., an antigen-binding (epitope-binding) structure)) of the polypeptide construct of the invention is capable of binding and discriminating CLDN6 on the surface of a cell that expresses CLDN6 binds to the E1A and/or the E2B regions of CLDN6 (SEQ ID NO: 1).

[0278] According to the invention, polypeptides/polypeptide constructs are provided, wherein a domain of said polypeptides/polypeptide constructs (comprise a paratope (i.e., an antigen-binding (epitope-binding) structure)) that is capable of binding and discriminating CLDN6 on the surface of a cell that expresses CLDN6 as depicted in SEQ ID NO: 1 and a CLDN6 mutant on the surface of a cell that expresses said CLDN6 mutant, wherein said CLDN6 mutant comprises the sequence as depicted in SEQ ID NO: 1, in which at least one of residues 31, 38, and 39 is replaced by another amino acid residue, particularly, wherein residue 31 is R and/or residue 38 is S and/or residue 39 is N, wherein optionally a domain (comprising a paratope (i.e., an antigen-binding (epitope-binding) structure)) of the construct of the invention binds CD3 (particularly human or non-human primate CD3), further wherein said polypeptides/polypeptide constructs are capable of engaging, activating T cells and inducing T cell-dependent cytotoxicity when it (e.g., a paratope (i.e., an antigen-binding (epitope-binding) structure)) binds to CLDN6 on the surface of a cell that expresses CLDN6 and when a further antigen-binding (epitope-binding) domain comprises a paratope that binds to CD3, and wherein the domain (comprising a paratope (i.e., an antigen-binding (epitope-binding) structure)) that binds CLDN6 comprises a heavy chain CDR3 region comprising the sequence: DX₁LIVX₂APX₃TRDYYYYGMDV (SEQ ID NO. 669), wherein X₁ is either A or N; X₂ is either V or E; and X₃ is either V or A, wherein optionally the domain (comprising a paratope (i.e., an antigen-binding (epitope-binding) structure)) that binds CLDN6 does not (immunoselectively or immunoselectively) bind to CLDN1, CLDN2, CLDN3, CLDN4, CLDN9, CLDN18.1 and/or CLDN18.2, wherein optionally the domain (comprising a paratope (i.e., an antigen-binding (epitope-binding) structure)) of the polypeptide construct of the invention is capable of binding and discriminating CLDN6 on the surface of a cell that expresses CLDN6 binds to the E1A and/or the E2B regions of CLDN6 (SEQ ID NO: 1). In embodiments the polypeptide/polypeptide constructs are capable of binding CLDN6 on the surface of a cell that expresses CLDN6 binds to the E1A and/or the E2B regions of CLDN6 (SEQ ID NO: 1) and do not bind to amino acids 138-150 of CLDN6 as depicted in SEQ ID NO: 1.

[0279] According to the invention, polypeptides/polypeptide constructs are provided,
[0280] wherein a domain of said polypeptides/polypeptide constructs (comprise a paratope (i.e., an antigen-binding (epitope-binding) structure)) that is capable of binding and discriminating CLDN6 on the surface of a cell that expresses CLDN6 as depicted in SEQ ID NO: 1 and a CLDN6 mutant on the surface of a cell that expresses said CLDN6 mutant, wherein said CLDN6 mutant comprises the sequence as depicted in SEQ ID NO: 1, in which at least one of residues 31, 38, and 39 is replaced by another amino acid residue, particularly, wherein residue 31 is R and/or residue 38 is S and/or residue 39 is N,
[0281] wherein optionally a domain (comprising a paratope (i.e., an antigen-binding (epitope-binding) structure)) of the construct of the invention binds CD3 (particularly human or non-human primate CD3),
[0282] further wherein said polypeptides/polypeptide constructs are capable of engaging, activating T cells and inducing T cell-dependent cytotoxicity when it (through a paratope (i.e., an antigen-binding (epitope-binding) structure)) binds to CLDN6 on the surface of a cell that expresses CLDN6 and when a further antigen-binding (epitope-binding) domain (comprises a paratope) that binds to CD3,
[0283] wherein the domain (comprising a paratope (i.e., an antigen-binding (epitope-binding) structure)) that is capable of binding and discriminating CLDN6 on the surface of a cell that expresses CLDN6 as depicted in SEQ ID NO: 1 comprises a heavy chain fragment comprising the heavy chain CDR3 region comprising a sequence that is selected from the group of sequences that are depicted in any one of SEQ ID Nos: 15, 23, 31, 39, 47, 55, 63, 71, 79, 87, 95, 103, 111, 119, 127, 135, 143, and 151, particularly from the group comprising sequences depicted in SEQ ID Nos: 15, 23, 31, and 47, very particularly the heavy chain CDR3 region comprises or consists of SEQ ID NO: 15;
[0284] wherein optionally the polypeptide construct does not selectively bind to CLDN2 (SEQ ID NO: 5), CLDN3 (SEQ ID NO: 6), CLDN4 (SEQ ID NO: 7), CLDN9 (SEQ ID NO: 8), CLDN18.1 (SEQ ID NO: 2) and/or CLDN18.2 (SEQ ID NO: 3), and/or
[0285] wherein the construct binds to the E1A and/or the E2B regions of CLDN6 (SEQ ID NO: 1), and do not bind to amino acids 138-150 of CLDN6 as depicted in SEQ ID NO: 1.

[0286] According to the invention, polypeptides/polypeptide constructs are provided that are comprising a domain which binds to human CLDN6 (SEQ ID NO: 1), and a domain which binds to human CD3, and a domain extending the half-life of the polypeptide as defined throughout the description and the claims, wherein the domain which binds to CLDN6 comprises a variable light (VL) chain domain that comprises a CDR1 region as depicted in the following sequence RASQSVX₁SX₂YLA (SEQ ID NO: 695), wherein X₁ is selected from S and R, preferably S, and wherein X₂ is selected from S and T, preferably S; and/or a CDR3 region as depicted in the following sequence QQYX₁X2SPX₃T (SEQ ID NO: 696) wherein X₁ is selected from G, D, and Q, preferably G, and wherein X₂ is selected from S, A and T, preferably S, and X₃ is selected from L and I, preferably L. In one particular embodiment, the polypeptides/polypeptide constructs have a VL chain comprising a CDR1 region as depicted in SEQ ID NO: 16 and a CDR3 region as depicted in SEQ ID NO: 18, further preferably in combination with a VL CDR2 region depicted in SEQ ID NO: 17, further particularly in combination with CDR1, CDR2, CDR3 region of the variable heavy (VH) chain domain as depicted in SEQ ID NOs: 13, 14, and/or 15; These polypeptides/polypeptides bind to CLDN6 regions depicted in SEQ ID NO: 9 and/or 10 as determined in domain swapping experiments (cf. the Examples section). It was found out that polypeptides or polypeptide constructs of the present invention are particularly well-suited to distinguish between CLDN6 and CLDN9 and preferably bind to and in vitro effectively kill CLDN6 cells, e.g. CHO cells transformed with nucleic acids encoding either CLDN6 or CLDN9. Not only is the cytotoxic activity better, but the polypeptides or polypeptide constructs also show a surprisingly high protein stability as determined in a DLS ° C. aggregation thermostability test at 1 mg/ml when they have the above captioned CDRs. These characteristics are important in polypeptides and/or polypeptides that are used in immune-oncology (T-cell engaging) therapeutic methods and for the preparation and storaging of pharmaceutical formulations.

[0287] According to the invention, polypeptides/polypeptide constructs are provided, wherein a domain (comprising a paratope (i.e., an antigen-binding (epitope-binding) structure)) binds to CLDN6 as defined in any one of the sections above, which further comprise a domain (comprising a paratope (i.e., an antigen-binding (epitope-binding) structure)) that binds to CD3, particularly to CD3-binding paratopes as disclosed, for example, in WO2019/133961, which only show cross-species specificity for the human and the Macaca, or Callithrix jacchus, Saguinus oedipus or Saimiri sciureus CD3ε chain, but also, due to recognizing this specific epitope (instead of previously described epitopes of CD3 binders in bispecific T cell engaging molecules), do not demonstrate unspecific activation of T cells to the same degree as observed for the previous generation of T cell engaging antibodies. The sequences of the CD3-binding domains/paratopes that can be used in context with the antibodies and constructs of the present invention are described below in the respective paragraphs.

[0288] Advantageously, targeting the epitope of CLDN6, which is recognized by the constructs of the present invention (see also the Examples section), provides the following benefits:
[0289] (1) Immunospecificity/immunoselectivity of the CLDN6×CD3 constructs over CLDN9 (Examples 1 and 5), and
[0290] (2) An unexpectedly high cytotoxic potency for the CLDN6×CD3 constructs (Examples 4, 6, and 7).

[0291] According to the invention, the polypeptides/polypeptide constructs of the present invention comprising a domain (comprising a paratope (i.e., an antigen-binding (epitope-binding) structure)) antigen-binding (epitope-binding) specifically and selectively binding to CD3, which is normally expressed on T cells.

[0292] Examples of a CD3c extracellular domain bound by the present domains/paratopes are shown in SEQ ID NOs: 442 and 443, respectively. Further, examples of CD3ε-binding domain/paratope amino acids, scFv's comprising the same, VH and VL chains are shown in SEQ ID NOs: 444 to 562 as well as in and particularly in SEQ ID NOs: 670 to 678.

[0293] The present invention relates also to polypeptides according to any of the preceding paragraphs, wherein a binding domain binding to an extracellular epitope of the human CD3ε chain comprising or consisting of a VH region linked to a VL region, wherein
[0294] i) the VH region comprises:
[0295] a CDR-H1 sequence of X1YAX2N, where X1 is K, V, S, G, R, T, or I; and X2 is M or I;
[0296] a CDR-H2 sequence of RIRSKYNNYATYYADX1VK X2, where X1 is S or Q; and X2 is D, G, K, S, or E; and
[0297] a CDR-H3 sequence of HX1NFGNSYX2SX3X4AY, where X1 is G, R, or A; X2 is I, L, V, or T; X3 is Y, W or F; and X4 is W, F or Y; and
[0298] ii) wherein the VL region comprises:
[0299] a CDR-L1 sequence of X1SSTGAVTX2X3X4YX5N, where X1 is G, R, or A; X2 is S or T; X3 is G or S; X4 is N or Y; and X5 is P or A;
[0300] a CDR-L2 sequence of X1TX2X3X4X5X6; where X1 is G or A; X2 is K, D, or N; X3 is F, M or K; X4 is L or R; X5 is A, P, or V; and X6 is P or S; and
[0301] a CDR-L3 sequence of X1LWYSNX2WV, where X1 is V, A, or T; and X2 is R or L; and
[0302] iii) wherein the CDR sequence of i) and/or ii) comprise one or more amino acid substitutions selected from X24V or X24F in CDR-H1;
[0303] D15 (preferably E), X116A in CDR-H2;
[0304] H1 (preferably A or N), X12E, F4 (preferably I), and/or N6 (preferably S or T) in CDR-H3; and
[0305] W93 (preferably Y) in CDR-L3.

[0306] The present invention relates to compounds which may have linkers, half-life extending peptides, and other structural moieties as disclosed in SEQ ID NOs: 563 to 575, and in SEQ ID NOs: 576 to 666, respectively. Details on functions of these structures are found in the Sequence table following the Examples section.

[0307] It is envisaged that polypeptides/polypeptide constructs in accordance with the present invention that the domain (comprising a paratope) binding to CD3 on the surface of a T cell comprise a VL region selected from the group consisting of VL regions as depicted in the respective SEQ ID numbers 444 to 562 and 677 exemplified in the sequence listing, particularly in SEQ ID numbers 507-512, and 534-541 and 677.

[0308] In another embodiment polypeptides/polypeptide constructs in accordance with the present invention that the domain (comprising a paratope) binding to CD3 on the surface of a T cell comprise a VL region as depicted in SEQ ID NO: 677.

[0309] It is also envisaged that polypeptides/polypeptide constructs in accordance with the present invention that the domain (comprising a paratope) binding to CD3 on the surface of a T cell comprise a VH region selected from the group consisting of VH regions as depicted in the respective SEQ ID numbers 444 to 562 and 676 exemplified in the sequence listing, particularly in SEQ ID numbers 513-533 and 676.

[0310] In another embodiment polypeptides/polypeptide constructs in accordance with the present invention that the domain (comprising a paratope) binding to CD3 on the surface of a T cell comprise a VH region as depicted in SEQ ID NO: 676.

[0311] More preferably, the polypeptides/polypeptide constructs in accordance with the present invention comprising the domain (comprising a paratope) binding to CD3 on the surface of a T cell comprise a VL region and a VH region selected from the group consisting of VL regions and VH regions as depicted in the respective SEQ ID numbers exemplified in the sequence listing, particularly, in the following pairs of VL regions and and VH regions, particularly in SEQ ID numbers 507+514, 508+519, 509+521, 510+525, 511+528, 512+532, 534+513, 535+515, 536+516, 537+517, 538+518, 539+520, 540+522, and 541+523, and very particularly the pair of VL regions and and VH regions, particularly in SEQ ID numbers 676+677.

[0312] A preferred embodiment of the above described polypeptides/polypeptide constructs in accordance with the present invention is characterized by a domain (comprising a paratope) which binds to CD3 on the surface of a T cell comprising an amino acid sequence selected from the group consisting of SEQ ID NOs: 542-562 and SEQ ID NO: 678.

[0313] A particular embodiment of the above described polypeptides/polypeptide constructs in accordance with the present invention is characterized by a domain (comprising a paratope) which binds to CD3 on the surface of a T cell comprising an amino acid sequence depicted in SEQ ID NO: 678.

[0314] A particular embodiment of the above described polypeptides/polypeptide constructs in accordance with the present invention is characterized by a domain (comprising a paratope) which binds to CD3 on the surface of a T cell comprising an amino acid sequence depicted in SEQ ID NO: 678, and wherein the domain (comprising the paratope (i.e., the antigen-binding (epitope-binding) structure)) binding to CLDN6 is comprised by, or which competes with the binding to CLDN6, with a pair of VH and VL regions comprising amino acid sequences depicted in SEQ ID NOs: 11+12, SEQ ID NO: 25+26, SEQ ID NO: 39+40, SEQ ID NO: 53+54, SEQ ID NO: 67+68, SEQ ID NO: 81+82, SEQ ID NO: 95+96, SEQ ID NO: 109+110, SEQ ID NO: 123+124, SEQ ID NO: 137+138, SEQ ID NO: 151+152, SEQ ID NO: 165+166, SEQ ID NO: 179+180, SEQ ID NO: 193+194, SEQ ID NO: 207+208, SEQ ID NO: 221+222, SEQ ID NO: 235+236, SEQ ID NO: 249+250, or SEQ ID NO: 263+264.

[0315] A particular embodiment of the above described polypeptides/polypeptide constructs in accordance with the present invention is characterized by a domain (comprising a paratope) which binds to CD3 on the surface of a T cell comprising an amino acid sequence depicted in SEQ ID NO: 678, and wherein the domain (comprising the paratope (i.e., the antigen-binding (epitope-binding) structure)) binding to CLDN6 is comprised by, or which competes with the binding to CLDN6, comprises amino acid sequences depicted in SEQ ID NOs: SEQ ID NO: 19, SEQ ID NO: 22, SEQ ID NO: 33, SEQ ID NO: 36, SEQ ID NO: 47, SEQ ID NO: 50, SEQ ID NO: 61, SEQ ID NO: 64, SEQ ID NO: 75, SEQ ID NO: 78, SEQ ID NO: 89, SEQ ID NO: 92, SEQ ID NO: 103, SEQ ID NO: 106, SEQ ID NO: 117, SEQ ID NO: 120, SEQ ID NO: 131, SEQ ID NO: 134, SEQ ID NO: 145, SEQ ID NO: 148, SEQ ID NO: 159, SEQ ID NO: 162, SEQ ID NO: 173, SEQ ID NO: 176, SEQ ID NO: 187, SEQ ID NO: 190, SEQ ID NO: 201, SEQ ID NO: 204, SEQ ID NO: 215, SEQ ID NO: 218, SEQ ID NO: 229, SEQ ID NO: 232, SEQ ID NO: 243, SEQ ID NO: 246, SEQ ID NO: 257, or SEQ ID NO: 260, SEQ ID NO: 271 or SEQ ID NO: 274.

[0316] A particular embodiment of the above described polypeptides/polypeptide constructs in accordance with the present invention is characterized by a domain (comprising a paratope) which binds to CD3 on the surface of a T cell comprising an amino acid sequence depicted in SEQ ID NO: 678, and wherein the domain (comprising the paratope (i.e., the antigen-binding (epitope-binding) structure)) binding to CLDN6 is depicted in a SEQ ID number selected from the group comprising SEQ ID NOs: 19, 22, 33, 36, 47, 50, 75, 78, 201, and 204, particularly SEQ ID NOs: 19 and 22, very particularly SEQ ID NO: 22.

[0317] Another particular embodiment of the above described polypeptides/polypeptide constructs in accordance with the present invention is characterized by a domain (comprising a paratope) which binds to CD3 on the surface of a T cell comprising an amino acid sequence depicted in SEQ ID NO: 678, and wherein the domain (comprising the paratope (i.e., the antigen-binding (epitope-binding) structure)) binding to CLDN6 is depicted in SEQ ID NO: 22.

[0318] A very particular embodiment of the above described polypeptides/polypeptide constructs in accordance with the present invention is characterized by a domain (comprising a paratope) which binds to CD3 on the surface of a T cell, said domain comprising VH CDR sequences HCDR1, HCDR2, and/or HCDR3, depicted in SEQ ID NOs: 670, 671, and/or 672, and/or wherein the domain (comprising a paratope) which binds to CD3 on the surface of a T cell comprises VL CDR sequences LCDR1, LCDR2, and/or LCDR3 is depicted in SEQ ID NOs: 673, 674, and/or 675, and wherein the domain (comprising the paratope (i.e., the antigen-binding (epitope-binding) structure)) binding to CLDN6 is depicted in any one of the sequences shown in SEQ ID NO: 22, 36, 50, 78, and 204.

[0319] Another very particular embodiment of the above described polypeptides/polypeptide constructs in accordance with the present invention is characterized by a domain (comprising a paratope) which binds to CD3 on the surface of a T cell, wherein said domain comprising VH CDR sequences HCDR1, HCDR2, and/or HCDR3, depicted in SEQ ID NOs: 670, 671, and/or 672, and/or wherein the domain comprises VL CDR sequences LCDR1, LCDR2, and/or LCDR3 is depicted in SEQ ID NOs: 673, 674, and/or 675, and wherein said domain (comprising the paratope (i.e., the antigen-binding (epitope-binding) structure)) binding to CLDN6 comprises VH CDR sequences HCDR1, HCDR2, and/or HCDR3 as depicted in SEQ ID NOs: 13, 14, and/or 15, and/or wherein the domain (comprising a paratope) comprises VL CDR sequences LCDR1, LCDR2, and/or LCDR3 as depicted in any one of the sequences shown in SEQ ID NOs: 16, 17, and/or 18.

[0320] Yet another very particular embodiment of the above described polypeptides/polypeptide constructs in accordance with the present invention is characterized by a domain (comprising a paratope) which binds to CD3 on the surface of a T cell, wherein said domain comprising VH CDR sequences HCDR1, HCDR2, and/or HCDR3 as depicted in any one of the sequences shown in SEQ ID NOs: 670, 671, and/or 672, and/or wherein the domain comprises VL CDR sequences LCDR1, LCDR2, and/or LCDR3 as depicted in any one of the sequences shown in SEQ ID NOs: 673, 674, and/or 675, and wherein said domain (comprising the paratope (i.e., the antigen-binding (epitope-binding) structure)) binding to CLDN6 comprises VH CDR sequences HCDR1, HCDR2, and/or HCDR3 as depicted in any one of the sequences shown in SEQ ID NOs: 27, 28, and/or 29, and/or wherein the domain (comprising a paratope) comprises VL CDR sequences LCDR1, LCDR2, and/or LCDR3 as depicted in any one of the sequences shown in SEQ ID NOs: 30, 31, and/or 32.

[0321] Still another very particular embodiment of the above described polypeptides/polypeptide constructs in accordance with the present invention is characterized by a domain (comprising a paratope) which binds to CD3 on the surface of a T cell, wherein said domain comprising VH CDR sequences HCDR1, HCDR2, and/or HCDR3 as depicted in any one of the sequences shown in SEQ ID NOs: 670, 671, and/or 672, and/or wherein the domain comprises VL CDR sequences LCDR1, LCDR2, and/or LCDR3 as depicted in any one of the sequences shown in SEQ ID NOs: 673, 674, and/or 675, and wherein said domain (comprising the paratope (i.e., the antigen-binding (epitope-binding) structure)) binding to CLDN6 comprises VH CDR sequences HCDR1, HCDR2, and/or HCDR3 as depicted in any one of the sequences shown in SEQ ID NOs: 41, 42, and/or 42, and/or wherein the domain (comprising a paratope) comprises VL CDR sequences LCDR1, LCDR2, and/or LCDR3 as depicted in any one of the sequences shown in SEQ ID NOs: 44, 45, and/or 46.

[0322] Still another very particular embodiment of the above described polypeptides/polypeptide constructs in accordance with the present invention is characterized by a domain (comprising a paratope) which binds to CD3 on the surface of a T cell, wherein said domain comprising VH CDR sequences HCDR1, HCDR2, and/or HCDR3 as depicted in any one of the sequences shown in SEQ ID NOs: 670, 671, and/or 672, and/or wherein the domain comprises VL CDR sequences LCDR1, LCDR2, and/or LCDR3 as depicted in any one of the sequences shown in SEQ ID NOs: 673, 674, and/or 675, and wherein said domain (comprising the paratope (i.e., the antigen-binding (epitope-binding) structure)) binding to CLDN6 comprises VH CDR sequences HCDR1, HCDR2, and/or HCDR3 as depicted in any one of the sequences shown in SEQ ID NOs: 69, 70, and/or 71, and/or wherein the domain (comprising a paratope) comprises VL CDR sequences LCDR1, LCDR2, and/or LCDR3 as depicted in any one of the sequences shown in SEQ ID NOs: 72, 73, and/or 74.

[0323] Still another very particular embodiment of the above described polypeptides/polypeptide constructs in accordance with the present invention is characterized by a domain (comprising a paratope) which binds to CD3 on the surface of a T cell, wherein said domain comprising VH CDR sequences HCDR1, HCDR2, and/or HCDR3 as depicted in any one of the sequences shown in SEQ ID NOs: 670, 671, and/or 672, and/or wherein the domain comprises VL CDR sequences LCDR1, LCDR2, and/or LCDR3 as depicted in any one of the sequences shown in SEQ ID NOs: 673, 674, and/or 675, and wherein said domain (comprising the paratope (i.e., the antigen-binding (epitope-binding) structure)) binding to CLDN6 comprises VH CDR sequences HCDR1, HCDR2, and/or HCDR3 as depicted in any one of the sequences shown in SEQ ID NOs: 195, 196, and/or 197, and/or wherein the domain (comprising a paratope) comprises VL CDR sequences LCDR1, LCDR2, and/or LCDR3 as depicted in any one of the sequences shown in SEQ ID NOs: 198, 199, and/or 200.

### Nucleic Acids, Host Cells and Processes of Producing the Compounds of the Invention

[0324] In a second aspect, it is further envisaged in the context of the present invention to provide a polynucleotide encoding a polypeptide construct of the present invention as depicted in any one of the preceding sections.

[0325] It is also envisaged in the context of the present invention to provide a vector comprising a polynucleotide of the present invention.

[0326] Further, the present invention to provides host cells transformed or transfected with the polynucleotide or with the vector of the present invention.

[0327] It is also envisaged in the context of the present invention to provide a process to produce a polypeptide construct of the present invention, said process comprising culturing a host cell of the present invention under conditions allowing the expression of the construct and recovering the produced polypeptide construct from the culture.

### Pharmaceutical Compositions of the Invention

[0328] In a further aspect, the present invention provides pharmaceutical compositions comprising a polypeptide compound of the present invention or polypeptide compounds produced according to the process of the present invention.

[0329] Within said aspect, is also envisaged in the context of the present invention that the pharmaceutical composition is stable for at least four weeks at about −20° C.

### Therapeutic Uses/Methods of the Invention

[0330] It is further envisaged in the context of the present invention to provide the polypeptide compounds and pharmaceutical compositions of the present invention or polypeptide compounds and pharmaceutical compositions comprising such polypeptide compounds that are produced according to processes of the present invention, for the use as a medicament, particularly for the use in the prevention, treatment or amelioration of a disease selected from a proliferative disease, a tumorous disease, cancer or an immunological disorder.

[0331] It is further envisaged in the context of the present invention to provide a method for the treatment or amelioration of a proliferative disease, a tumorous disease, cancer, or an immunological disorder, comprising the step of administering to a subject in need thereof a polypeptide compound or pharmaceutical composition of the present invention, wherein optionally, the compound is produced according to the process of the present invention.

[0332] Preferably the disease is selected from the group comprising various types of cancer expressing CLDN6 selected from the group consisting of urinary bladder cancer, ovarian cancer, in particular ovarian adenocarcinoma and ovarian teratocarcinoma, lung cancer, including small cell lung cancer (SCLC) and non-small cell lung cancer (NSCLC), in particular squamous cell lung carcinoma and adenocarcinoma, gastric cancer, breast cancer, hepatic cancer, pancreatic cancer, skin cancer, in particular basal cell carcinoma and squamous cell carcinoma, malignant melanoma, head and neck cancer, in particular malignant pleomorphic adenoma, sarcoma, in particular synovial sarcoma and carcinosarcoma, bile duct cancer, cancer of the urinary bladder, in particular transitional cell carcinoma and papillary carcinoma, kidney cancer, in particular renal cell carcinoma including clear cell renal cell carcinoma and papillary renal cell carcinoma, colon cancer, small bowel cancer, including cancer of the ileum, in particular small bowel adenocarcinoma and adenocarcinoma of the ileum, testicular embryonal carcinoma, placental choriocarcinoma, cervical cancer, testicular cancer, in particular testicular seminoma, testicular teratoma and embryonic testicular cancer, uterine cancer, germ cell tumors such as a teratocarcinoma or an embryonal carcinoma, in particular germ cell tumors of the testis, and the metastatic forms thereof, very particularly testicular germ cell cancer, ovarian cancer, particularly ovarian serous cystadenocarcinoma, and uterine cancer such as uterine corpus endometrial carcinoma, lung cancer, including small cell lung cancer (SCLC) and non-small cell lung cancer (NSCLC), such as lung adenocarcinoma, triple negative breast cancer, stomach cancer, cholangiocarcinoma, esophagus cancer, Wilms tumor, rhabdoid tumor, particularly, ovarian cancer, uterine cancer, and/or lung cancer, and more particularly ovarian serous cystadenocarcinoma, uterine carcinosarcoma, uterine corpus endometrial carcinoma, and/or in particular squamous cell lung carcinoma and lung adenocarcinoma.

[0333] Also provided are uses of the herein described compounds for the preparation of medicaments for the treatment or prevention or amelioration of a neoplastic disease, particularly, ovarian cancer, uterine cancer, and/or lung cancer.

[0334] It is envisaged in the context of the present invention to provide a method for the treatment or amelioration of gastrointestinal cancer, comprising the step of administering to a subject in need thereof a construct directed against CLDN6 and CD3.

[0335] It is also envisaged in the context of the present invention to provide polypeptides/polypeptide constructs directed against CLDN6 and CD3 for the use as a medicament, particularly for the use in the treatment or amelioration of, e.g., ovarian cancer, uterine cancer, lung cancer, particularly ovarian cancer, in particular ovarian adenocarcinoma and ovarian teratocarcinoma, lung cancer, including small cell lung cancer (SCLC) and non-small cell lung cancer (NSCLC), in particular squamous cell lung carcinoma and adenocarcinoma.

### Kits of the Invention

[0336] In another aspect, it is also envisaged in the context of the present invention to provide a kit comprising a polypeptide construct of the present invention or produced according to the process of the present invention, a polynucleotide of the present invention, a vector of the present invention, and/or a host cell of the present invention.

### Definitions of Terms According to the Invention

[0337] The term “polypeptide construct” (alternatively referred to simply as “compound”) refers to an antigen-binding (or epitope-binding) molecule comprising domains themselves comprising paratopes. In the context of the present invention, a polypeptide construct is understood as an organic polymer which comprises at least one continuous, unbranched amino acid chain that naturally is not existing, but was engineered. An example of a polypeptide construct that is a single polypeptide is a BiTE® molecule that comprises a core structure comprising at least one functional target binding domain together with at least one complete functional CD3 binding domain on a single polypeptide chain, wherein these domains are linked directly by flexible peptide (a “linker”) without any further inserted domain unlike Xmabs that comprise the target binder and the CD3 binder on different polypeptide chains. In the context of the present invention, such a polypeptide construct comprising more than one amino acid chain is likewise envisaged. It is preferred that the term “polypeptide” is used in connection with single chain forms of the compounds of the present invention, whereas “polypeptide construct” may preferably be more adequate to describe also polypeptides that comprise more than one polypeptide chain, for example two, three or four polypeptide chains. Additionally, the term “polypeptide construct” is also suitable to describe compounds of the invention that comprise one or more non-amino acid-based constituents, e.g. human serum albumin, etc. (HSA). An amino acid chain of a polypeptide typically comprises at least 50 amino acids, preferably at least 100, 200, 300, 400 or 500 amino acids. It is also envisaged in the context of the present invention that an amino acid chain of a polymer is linked to an entity which is not composed of amino acids.

[0338] The polypeptides comprise structural and/or functional features based on the structure and/or function of an antibody, e.g., of a full-length immunoglobulin molecule. A polypeptide construct, hence, specifically and, preferably, selectively or immunospecifically binds to its target or antigen, more precisely to an epitope of said target or target antigen, and/or it comprises the heavy chain variable region (VH) and/or the light chain variable region (VL) naturally found in an antibody, or comprises domains derived therefrom. Accordingly, the constructs may alternatively be regarded as comprising paratope-structured (i.e., paratope-structure forming) and epitope-binding structures, such as those found in natural antibodies or fragments thereof. A polypeptide construct according to the invention comprises the minimum structural requirements of an antibody which allow for immunospecific target binding, i.e., a paratope that recognizes immunospecifically or immunoselectively an epitope on a target antigen. This minimum requirement may e.g. be defined by the presence of at least three light chain CDRs (i.e. CDR1, CDR2 and CDR3 of the VL region) and/or three heavy chain CDRs (i.e. CDR1, CDR2 and CDR3 of the VH region), preferably of all six CDRs. A polypeptide construct may hence be characterized by the presence of three or six CDRs in either one or both binding domains, and the skilled person knows where (in which order) those CDRs are located within the paratopic binding structures. The term “antigen-binding structure”, as used herein, refers to any polypeptide that comprises an antigen-binding structure or any molecule that has binding activity to an antigen. The peptide and protein are not limited to those derived from a living organism, and for example, they may be a polypeptide produced from an artificially designed sequence. They may also be any of a naturally occurring polypeptide, synthetic polypeptide, recombinant polypeptide, and such. As the antigen-binding structure in accordance with the present invention bind specifically to parts of an antigen, i.e., they bind specifically to an epitope, the antigen (epitope)-binding structure may also be defined as “paratopic structure”. Accordingly, the polypeptides/polypeptide constructs according to the invention may also be defined as a domain comprising a paratope that are preferably immunospecifically or immunoselectively binding to a target antigen/target epitope and a further paratopic domain, preferably immunospecifically or immunoselectively, binding to a further target antigen/target epitope of the CD3 molecule as defined herein. Therefore, whenever the present description refers to a domain of a contruct or molecule of the present invention, the construct comprises at least one paratopic structure (or paratope) binding CLDN6 as defined herein, particularly according to any one of the appended claims, and a further paratopic structure binding CD3 as defined herein.

[0339] The term “antibody” as used in accordance with the invention comprises full-length antibodies, also including camelid antibodies and other immunoglobulins generated by biotechnological or protein engineering methods or processes. These full-length antibodies may be for example monoclonal, recombinant, chimeric, deimmunized, humanized and human antibodies, as well as antibodies from other species such as mouse, hamster, rabbit, rat, goat, or non-human primates.

[0340] “Polypeptides/polypeptide constructs” of the present invention may also comprise the structure of a full-length immunoglobulin as it occurs naturally. For example, they may comprise (at least) two full-length antibody heavy chains and two full-length antibody light chains. However, given that the polypeptides/polypeptide constructs according to the invention comprise one domain comprising a paratope binding to CLDN6 and another domain comprising a paratope binding to CD3, they do not occur naturally, and they are markedly different in their function from naturally occurring products. A polypeptide or polypeptide construct of the invention is hence an artificial “hybrid” molecule comprising distinct binding domains with different specificities and/or selectivities.

[0341] As indicated above, the polypeptides of the invention may comprise more than one polypeptide chain, i.e. polypeptides comprising two or more polypeptide chains are also subject to the present invention, particularly polypeptides forming a three-dimensional protein-like structure that allows for the immunospecific binding to CLDN6 and CD3. Therefore, the definition of the term “polypeptide construct” includes molecules consisting of only one polypeptide chain as well as molecules consisting of two, three, four or more polypeptide chains, which chains can be either identical (homodimers, homotrimers or homo oligomers) or different (heterodimer, heterotrimer or heterooligomer). Examples for the above identified antibodies and their fragments, variants, derivatives and constructs derived therefrom are described inter alia in Harlow and Lane, Antibodies: A laboratory manual, CSHL Press (1988); Kontermann and Dubel, Antibody Engineering, Springer, 2nd ed. 2010; and Little, Recombinant Antibodies for Immunotherapy, Cambridge University Press 2009

[0342] “Polypeptides/polypeptide constructs” of the present invention may also comprise fragments of full-length antibodies, such as VH, VHH, VL, (s)dAb, Fv, light chain (VL-CL), Fd (VH-CH1), heavy chain, Fab, Fab′, F(ab′)2 or “rIgG” (“half antibody” consisting of a heavy chain and a light chain). Polypeptides/polypeptide constructs according to the invention may also comprise modified fragments of antibodies, also called antibody variants or antibody derivatives. Examples include, but are not limited to, scFv, di-scFv or bi(s)-scFv, scFv-Fc, scFv-zipper, scFab, Fab2, Fab3, diabodies, single chain diabodies, tandem diabodies (Tandab's), tandem di-scFv, tandem tri-scFv, “minibodies” exemplified by a structure which is as follows: (VH-VL-CH3)2, (scFv-CH3)2, ((scFv)2-CH3+CH3), ((scFv)2-CH3) or (scFv-CH3-scFv)2, multibodies such as triabodies or tetrabodies, and single domain antibodies such as nanobodies or single variable domain antibodies comprising merely one variable region, which might be VHH, VH or VL, that selectively and, preferably, specifically binds to an antigen or target independently of other variable regions or domains. Further possible formats of the polypeptides/polypeptide constructs according to the invention are cross bodies, maxi bodies, hetero Fc constructs, mono Fc constructs and scFc constructs. Examples for those formats will be described herein below.

[0343] Furthermore, the definition of the term “polypeptide construct” includes bivalent and polyvalent/multivalent polypeptides/polypeptide constructs as well as bispecific and polyspecific/multispecific polypeptides/polypeptide constructs, which selectively and, preferably, specifically bind to two, three or more antigenic structures (epitopes), through distinct binding domains. A polypeptide construct can have more binding valences than specificities, e.g. in a case where it has two binding domains for one target (CLDN6) and one binding domain for another target (CD3), or vice versa, in which case the polypeptide construct is trivalent and bispecific. In general, the term “bispecific” includes the meaning that a polypeptide construct binds to (at least) two different antigens, such as CLDN6 and CD3.

[0344] The terms “paratope”, “antigen-binding domain”, “epitope-binding domain”, “binding domain” or “domain which binds to . . . ” characterize, in connection with the present invention, a domain of the construct which selectively and, preferably, specifically or immunospecifically binds to/interacts with/recognizes an epitope on the target or antigen (here: CLDN6 in the case of the first domain, and CD3 in the case of the second domain). The terms “binding domain” or “domain which binds to . . . ” or “domain” as far as it relates to the herein described “constructs” characterizes in connection with the present invention, a domain of the construct which immunospecifically binds to/interacts with/recognizes an epitope (i.e. interacts selectively with certain amino acids) on the target or antigen. The structure and function of the first domain (binding to a target antigen), and preferably also the structure and/or function of the second domain (binding to CD3), is/are based on the structure and/or function of an antibody, e.g. of a full-length immunoglobulin polypeptide. The “binding domain” or “domain which binds to . . . ” may hence comprise the minimum structural requirements of an antibody which allow for immunospecific target binding. This minimum structural requirement of the first domain may e.g. be defined by the presence of at least three light chain CDRs (i.e. CDR1, CDR2 and CDR3 of the VL region) and/or of three heavy chain CDRs (i.e. CDR1, CDR2 and CDR3 of the VH region), preferably of all six CDRs. It is envisaged that the second domain also comprises this minimum structural requirement of an antibody which allow for the immunospecific target binding. More preferably, the second domain also comprises at least three light chain CDRs (i.e. CDR1, CDR2 and CDR3 of the VL region) and/or three heavy chain CDRs (i.e. CDR1, CDR2 and CDR3 of the VH region), preferably all six CDRs. A “domain which binds to” (or a “binding domain”) may typically comprise an antibody light chain variable region (VL) and an antibody heavy chain variable region (VH); however, it does not have to comprise both, but may comprise only one of VH or VL. Fd fragments, for example, often retain some antigen-binding function of the intact antigen-binding domain. The terms “paratope”, “antigen-binding structure” and “epitope-binding structure, as used herein, refer also to a portion of an antibody (or a molecule according to the invention), which comprises a region that specifically binds and is complementary to the whole or a portion of an antigen or a part thereof, i.e. an antibody can only bind to a particular portion of the antigen. The particular portion is called “epitope”. An antigen-binding domain can be provided from one or more antibody variable domains. Preferably, the antigen-binding domains contain antibody variable region that comprising both the antibody light chain variable region (VL) and antibody heavy chain variable region (VH). Such preferable antigen-binding domains include, for example, “single-chain Fv (scFv)”, “single-chain antibody”, “Fv”, “single-chain Fv2 (scFv2)”, “Fab”, and “F (ab′)2”. A “paratope” may also be characterized by specific amino acids that interact chemically with specific amino acids on the side of the epitope (antigen/target).

[0345] Examples for the format of a “domain which binds to”, “domain comprising a paratope” (or “binding domain”, “antigen-binding structure”, “epitope-binding structure”) include, but are not limited to, full-length antibodies, fragments of full-length antibodies (such as VH, VHH, VL), (s)dAb, Fv, light chain (VL-CL), Fd (VH-CH1), heavy chain, Fab, Fab′, F(ab′)2 or “r IgG” (“half antibody”)), antibody variants or derivatives such as scFv, di-scFv or bi(s)-scFv, scFv-Fc, scFv-zipper, scFab, Fab2, Fab3, diabodies, single chain diabodies, tandem diabodies (Tandab's), tandem di-scFv, tandem tri-scFv, “minibodies” (selected from formats such as (VH-VL-CH3)2, (scFv-CH3)2, ((scFv)2-CH3+CH3)), ((scFv)2-CH3) or (scFv-CH3-scFv)2, multibodies such as triabodies or tetrabodies, and single domain antibodies such as nanobodies or single variable domain antibodies comprising merely one variable region, which might be VHH, VH or VL. Further examples for the format of a “domain which binds to” (or a “binding domain”) include (1) an antibody fragment or variant comprising VL, VH, CL and CH1 (such as Fab); (2) an antibody fragment or variant comprising two linked Fab fragments (such as a F(ab′)2); (3) an antibody fragment or variant comprising VH and CH1 (such as Fd); (4) an antibody fragment or variant comprising VL and CL (such as the light chain); (5) an antibody fragment or variant comprising VL and VH (such as Fv); (5) a dAb fragment (Ward et al., (1989) Nature 341:544-546), which has a VH domain; (6) an antibody variant comprising at least three isolated CDRs of the heavy and/or the light chain; and (7) a single chain Fv (scFv). Examples for embodiments of constructs or binding domains according to the invention are e.g. described in WO 00/006605, WO 2005/040220, WO 2008/119567, WO 2010/037838, WO 2013/026837, WO 2013/026833, US 2014/0308285, US 2014/0302037, WO 2014/144722, WO 2014/151910, and WO 2015/048272. In the context of the present invention, a paratope is understood as an antigen-binding site which is a part of a polypeptide as described herein and which recognizes and binds to an antigen. A paratope is typically a small region of about at least 5 amino acids. A paratope as understood herein typically comprises parts of antibody-derived heavy (VH) and light chain (VL) sequences. Each binding domain of a polypeptide according to the present invention is provided with a paratope comprising a set of 6 complementarity-determining regions (CDR loops) with three of each being comprised within the antibody-derived VH and VL sequence, respectively.

[0346] It is envisaged for the compounds, particularly for the constructs of the present invention that a) the construct is a single chain polypeptide or a single chain construct, b) the first domain is in the format of an scFv, c) the second domain is in the format of an scFv, d) the first and the second domain are connected via a linker, preferably a peptide linker, more preferably a glycine/serine linker, and/or e) the construct comprises a domain providing an extended serum half-life, such as an Fc-based domain, or human serum albumin (HSA). In the latter case, it is preferred embodiment, wherein the term “polypeptide construct” makes clear that it comprises more than a single peptide chain.

[0347] The constructs of the present invention are preferably “in vitro generated constructs” and/or “recombinant constructs”. In the context of the present invention, the term “in vitro generated” refers to a construct according to the above definition where all or part of the binding domain or of a variable region (e.g., at least one CDR) is generated in a non-immune cell selection, e.g., in an in vitro phage display, on a protein chip or in any other method in which candidate amino acid sequences can be tested for their ability to bind to an antigen. This term thus preferably excludes sequences generated solely by genomic rearrangement in an immune cell in an animal. It is envisaged that the first and/or second domain of the construct is produced by or obtainable by phage display or library screening methods rather than by grafting CDR sequences from a pre-existing (monoclonal) antibody into a scaffold. A “recombinant construct” is a construct generated or produced using (inter alia) recombinant DNA technology or genetic engineering.

[0348] The constructs of the present invention are envisaged to be monoclonal. As used herein, polypeptides or constructs that are denominated “monoclonal” (mAb) are obtained from a population of substantially homogeneous antibodies/constructs, i.e., the individual antibodies/constructs comprised in the population are identical (in particular with respect to their amino acid sequence) except for possible naturally occurring mutations and/or post-translational modifications (e.g., isomerizations, amidations) that may be present in minor amounts. Monoclonal antibodies/constructs are highly specific, being directed against a single epitope within the antigen, in contrast to polyclonal antibody preparations which typically include different antibodies directed against different determinants (or epitopes). In addition to their specificity, monoclonal antibodies are advantageous in that they are synthesized by the hybridoma culture, hence uncontaminated by other immunoglobulins. The modifier “monoclonal” indicates the character of the antibody/construct as being obtained from a substantially homogeneous population of antibodies and is not to be construed as requiring production of the antibody by any specific method.

[0349] For the preparation of monoclonal antibodies, any technique providing antibodies produced by continuous cell line cultures can be used. For example, monoclonal antibodies to be used may be made by the hybridoma method first described by Koehler et al., Nature, 256: 495 (1975), or may be made by recombinant DNA methods (see, e.g., U.S. Pat. No. 4,816,567). Examples for further techniques to produce human monoclonal antibodies include the trioma technique, the human B-cell hybridoma technique (Kozbor, Immunology Today 4 (1983), 72) and the EBV-hybridoma technique (Cole et al., Monoclonal Antibodies and Cancer Therapy, Alan R. Liss, Inc. (1985), 77-96).

[0350] Hybridomas can then be screened using standard methods, such as enzyme-linked immunosorbent assay (ELISA) and surface plasmon resonance (BIACORE™) analysis, to identify one or more hybridomas that produce an antibody that selectively and, preferably, specifically or immunospecifically binds to a specified antigen. Any form of the relevant antigen may be used as the immunogen, e.g., recombinant antigen, naturally occurring forms, any variants or fragments thereof, as well as an antigenic peptide thereof. Surface plasmon resonance as employed in the BIAcore™ system can be used to increase the efficiency of phage antibodies/constructs which bind to an epitope of a target antigen (Schier, Human Antibodies Hybridomas 7 (1996), 97-105; Malmborg, J. Immunol. Methods 183 (1995), 7-13).

[0351] Another exemplary method of making constructs or binding domains includes screening protein expression libraries, e.g., phage display or ribosome display libraries. Phage display is described, for example, in Ladner et al., U.S. Pat. No. 5,223,409; Smith (1985) Science 228:1315-1317, Clackson et al., Nature, 352: 624-628 (1991) and Marks et al., J. Mol. Biol., 222: 581-597 (1991).

[0352] In addition to the use of display libraries, the relevant antigen can be used to immunize a non-human animal, e.g., a rodent (such as a mouse, hamster, rabbit or rat). In one embodiment, the non-human animal includes at least a part of a human immunoglobulin gene. For example, it is possible to engineer mouse strains deficient in mouse antibody production with large fragments of the human Ig (immunoglobulin) loci. Using the hybridoma technology, antigen-specific monoclonal antibodies derived from the genes with the desired specificity may be produced and selected. See, e.g., Xenomouse™, Green et al. (1994) Nature Genetics 7:13-21, US 2003-0070185, WO 96/34096, and WO 96/33735.

[0353] A monoclonal antibody can also be obtained from a non-human animal, and then modified, e.g., humanized, deimmunized, rendered chimeric etc., using recombinant DNA techniques known in the art. Examples of modified constructs or binding domains include humanized variants of non-human antibodies/constructs, “affinity matured” constructs or binding domains (see, e.g. Hawkins et al. J. Mol. Biol. 254, 889-896 (1992) and Lowman et al., Biochemistry 30, 10832-10837 (1991)) and antibody variants or mutants with altered effector function(s) (see, e.g., U.S. Pat. No. 5,648,260, Kontermann and Dübel (2010), loc. cit. and Little (2009), loc. cit.).

[0354] In immunology, affinity maturation is the process by which B cells produce antibodies with increased affinity for antigen during the course of an immune response. With repeated exposures to the same antigen, a host will produce antibodies of successively greater affinities. Like the natural prototype, the in vitro affinity maturation is based on the principles of mutation and selection. The in vitro affinity maturation has successfully been used to optimize antibodies, antibody fragments, antibody variants, constructs or binding domains. Random mutations inside the CDRs are introduced using radiation, chemical mutagens or error-prone PCR. In addition, the genetic diversity can be increased by chain shuffling. Two or three rounds of mutation and selection using display methods like phage display usually results in antibodies, antibody fragments, antibody variants, constructs or binding domains with affinities in the low nanomolar range.

[0355] A preferred type of an amino acid substitutional variation of the constructs or binding domains of the invention involves substituting one or more residues within the hypervariable region of a parent antibody structure (e.g. a humanized or human antibody structure). Generally, the resulting variant(s) selected for further development will have improved biological properties relative to the parent antibody structure from which they are generated. A convenient way for generating such substitutional variants involves affinity maturation using phage display. Briefly, several sites of the hypervariable region (e. g. 6-7 sites) are mutated to generate all possible amino acid substitutions at each site. The variants thus generated are displayed in a monovalent fashion from filamentous phage particles as fusions to the gene III product of M13 packaged within each particle. The phage-displayed variants are then screened for their biological activity (e.g. binding affinity) as disclosed herein. To identify candidate hypervariable region sites contributing significantly to antigen binding (candidates for modification), alanine scanning mutagenesis can also be performed. Alternatively, or additionally, it may be beneficial to analyze a crystal structure of the complex between the antigen and the construct or the binding domain to identify contact points between the binding domain and its specific antigen. Such contact residues and neighbouring residues are candidates for substitution according to the techniques elaborated herein. Once such variants are generated, the panel of variants is subjected to screening as described herein and antibodies, their antigen-binding fragments, constructs or binding domains with superior properties in one or more relevant assays may be selected for further development.

[0356] The constructs and binding domains of the present invention specifically include “chimeric” versions in which a portion of the heavy and/or light chain is identical with or homologous to corresponding sequences in antibodies derived from a particular species or belonging to a particular antibody class or subclass, while the remainder of the chain(s) is/are identical with or homologous to corresponding sequences in antibodies derived from another species or belonging to another antibody class or subclass, as well as fragments or variants of such antibodies, so long as they exhibit the desired biological activity (U.S. Pat. No. 4,816,567; Morrison et al., Proc. Natl. Acad. Sci. USA, 81: 6851-6855 (1984)). Chimeric constructs or binding domains of interest herein include “primitized” constructs comprising variable domain antigen-binding sequences derived from a non-human primate (e.g., Old World Monkey, Ape etc.) and human constant region sequences. A variety of approaches for making chimeric antibodies or constructs have been described. See e.g., Morrison et al., Proc. Natl. Acad. ScL U.S.A. 81:6851, 1985; Takeda et al., Nature 314:452, 1985, Cabilly et al., U.S. Pat. No. 4,816,567; Boss et al., U.S. Pat. No. 4,816,397; Tanaguchi et al., EP 0171496; EP 0173494; and GB 2177096.

[0357] An antibody, polypeptide construct, antibody fragment, antibody variant or binding domain may also be modified by specific deletion of human T cell epitopes (a method called “deimmunization”) using methods disclosed for example in WO 98/52976 or WO 00/34317. Briefly, the heavy and light chain variable regions of an antibody, construct or binding domain can be analyzed for peptides that bind to MHC class II; these peptides represent potential T cell epitopes (as defined e.g. in WO 98/52976 and WO 00/34317). For detection of potential T cell epitopes, a computer modeling approach termed “peptide threading” can be applied, and in addition a database of human MHC class II binding peptides can be searched for motifs present in the VH and VL sequences, as described in WO 98/52976 and WO 00/34317. These motifs bind to any of the 18 major MHC class II DR allotypes, and thus constitute potential T cell epitopes. Potential T cell epitopes detected can be eliminated by substituting small numbers of amino acid residues in the variable domains or variable regions, or preferably, by single amino acid substitutions. Typically, conservative substitutions are made. Often, but not exclusively, an amino acid common to a position in human germline antibody sequences may be used. Human germline sequences are disclosed e.g. in Tomlinson, et al. (1992) J. MoI. Biol. 227:776-798; Cook, G. P. et al. (1995) Immunol. Today Vol. 16 (5): 237-242; and Tomlinson et al. (1995) EMBO J. 14: 14:4628-4638. The V BASE directory (www2.mrc-lmb.cam.ac.uk/vbase/list2.php) provides a comprehensive directory of human immunoglobulin variable region sequences (compiled by Tomlinson, LA. et al. MRC Centre for Protein Engineering, Cambridge, UK). These sequences can be used as a source of human sequence, e.g., for framework regions and CDRs. Consensus human framework regions can also be used, for example as described in U.S. Pat. No. 6,300,064.

[0358] “Humanized” antibodies, variants or fragments thereof, constructs and binding domains are based on immunoglobulins of mostly human sequences, which contain (a) minimal sequence(s) derived from non-human immunoglobulin. For the most part, humanized antibodies, variants or fragments thereof, constructs and binding domains are based on human immunoglobulins (recipient antibodies) in which residues from a hypervariable region or CDR are replaced by residues from a hypervariable region or CDR of a non-human species (donor antibody) such as a rodent (e.g. mouse, hamster, rat or rabbit) having the desired specificity, affinity, capacity and/or biological activity. In some instances, Fv framework region (FR) residues of the human immunoglobulin are replaced by corresponding non-human residues. Furthermore, “humanized” antibodies, variants or fragments thereof, constructs and binding domains as used herein may also comprise residues which are found neither in the recipient antibody nor the donor antibody. These modifications are made to further refine and optimize antibody performance. The humanized antibodies, variants or fragments thereof, constructs and binding domains may also comprise at least a portion of an immunoglobulin constant region (such as Fc), typically that of a human immunoglobulin. For further details, see Jones et al., Nature, 321: 522-525 (1986); Reichmann et al., Nature, 332: 323-329 (1988); and Presta, Curr. Op. Struct. Biol., 2: 593-596 (1992).

[0359] Humanized antibodies, variants or fragments thereof, constructs and binding domains can be generated by replacing sequences of the (Fv) variable region that are not directly involved in antigen binding with equivalent sequences from human (Fv) variable regions. Exemplary methods for generating such molecules are provided by Morrison (1985) Science 229:1202-1207; by Oi et al. (1986) BioTechniques 4:214; and by U.S. Pat. Nos. 5,585,089; 5,693,761; 5,693,762; 5,859,205; and 6,407,213. These methods include isolating, manipulating, and expressing the nucleic acid sequences that encode all or part of immunoglobulin (Fv) variable regions from at least one of a heavy or light chain. Such nucleic acids may be obtained from a hybridoma producing an antibody against a predetermined target, as described above, as well as from other sources. The recombinant DNA encoding the humanized antibody, variant or fragment thereof, construct or binding domain can then be cloned into an appropriate expression vector.

[0360] Humanized antibodies, variants or fragments thereof, constructs and binding domains may also be produced using transgenic animals such as mice that express human heavy and light chain genes but are incapable of expressing the endogenous mouse immunoglobulin heavy and light chain genes. Winter describes an exemplary CDR grafting method that may be used to prepare the humanized molecules described herein (U.S. Pat. No. 5,225,539). All the CDRs of a given human sequence may be replaced with at least a portion of a non-human CDR, or only some of the CDRs may be replaced with non-human CDRs. It is only necessary to replace the number of CDRs required for binding of the humanized molecule to a predetermined antigen.

[0361] A humanized antibody, variant or fragment thereof, construct or binding domain can be optimized by the introduction of conservative substitutions, consensus sequence substitutions, germline substitutions and/or back mutations. Such altered immunoglobulin molecules can be made by any of several techniques known in the art, (e.g., Teng et al., Proc. Natl. Acad. Sci. U.S.A., 80: 7308-7312, 1983; Kozbor et al., Immunology Today, 4: 7279, 1983; Olsson et al., Meth. Enzymol., 92: 3-16, 1982, and EP 239 400).

[0362] Human anti-mouse antibody (HAMA) responses have led the industry to prepare chimeric or otherwise humanized antibodies/constructs. It is however expected that certain human anti-chimeric antibody (HACA) responses will be observed, particularly in chronic or multi-dose utilizations of an antibody or construct. Thus, it would be desirable to provide constructs comprising a human binding domain against CLDN6 and/or a human binding domain against CD3, to vitiate concerns and/or effects of HAMA or HACA response.

[0363] Therefore, according to one embodiment, the polypeptide construct, one binding domain and/or another binding domain are “human”. The term “human antibody”, “human construct” and “human binding domain” includes antibodies, constructs and binding domains, respectively, having antibody-derived regions such as variable and constant regions or domains which correspond substantially to human germline immunoglobulin sequences known in the art, including, for example, those described by Kabat et al. (1991) (loc. cit.). The human constructs or binding domains of the invention may include amino acid residues not encoded by human germline immunoglobulin sequences (e.g., mutations introduced by random or site-specific mutagenesis in vitro or by somatic mutation in vivo), for example in the CDRs, and particularly in CDR3. The human constructs or binding domains can have at least one, two, three, four, five, or more positions replaced with an amino acid residue that is not encoded by the human germline immunoglobulin sequence. The definition of human antibodies, constructs and binding domains as used herein also contemplates fully human antibodies, constructs and binding domains which include only non-artificially and/or genetically altered human sequences of antibodies as those can be derived by using technologies or systems such as the Xenomouse.

[0364] Polypeptides/polypeptide constructs comprising at least one human binding domain avoid some of the problems associated with antibodies or constructs that possess non-human such as rodent (e.g. murine, rat, hamster or rabbit) variable and/or constant regions. The presence of such rodent derived proteins can lead to the rapid clearance of the antibodies or constructs or can lead to the generation of an immune response against the antibody or construct by a patient. To avoid the use of rodent-derived constructs, humanized or fully huma constructs can be generated through the introduction of human antibody function into a rodent so that the rodent produces fully human antibodies.

[0365] The ability to clone and reconstruct megabase-sized human loci in YACs and to introduce them into the mouse germline provides a powerful approach to elucidating the functional components of very large or crudely mapped loci as well as generating useful models of human disease. Furthermore, the use of such technology for substitution of mouse loci with their human equivalents could provide unique insights into the expression and regulation of human gene products during development, their communication with other systems, and their involvement in disease induction and progression.

[0366] An important practical application of such a strategy is the “humanization” of the mouse humoral immune system. Introduction of human immunoglobulin (Ig) loci into mice in which the endogenous Ig genes have been inactivated offers the opportunity to study the mechanisms underlying programmed expression and assembly of antibodies as well as their role in B-cell development. Furthermore, such a strategy could provide an ideal source for production of fully human monoclonal antibodies (mAbs)—an important milestone towards fulfilling the promise of antibody therapy in human disease. Fully human antibodies or constructs derived therefrom are expected to minimize the immunogenic and allergic responses intrinsic to mouse or mouse-derivatized mAbs and thus to increase the efficacy and safety of the administered antibodies/constructs. The use of fully human antibodies or constructs can be expected to provide a substantial advantage in the treatment of chronic and recurring human diseases, such as inflammation, autoimmunity, and cancer, which require repeated compound administrations.

[0367] One approach towards this goal was to engineer mouse strains deficient in mouse antibody production with large fragments of the human Ig loci in anticipation that such mice would produce a large repertoire of human antibodies in the absence of mouse antibodies. Large human Ig fragments would preserve the large variable gene diversity as well as the proper regulation of antibody production and expression. By exploiting the mouse machinery for antibody diversification and selection and the lack of immunological tolerance to human proteins, the reproduced human antibody repertoire in these mouse strains should yield high affinity antibodies against any antigen of interest, including human antigens. Using the hybridoma technology, antigen-specific human mAbs with the desired specificity could be readily produced and selected. This general strategy was demonstrated in connection with the generation of the first XenoMouse mouse strains (see Green et al. Nature Genetics 7:13-21 (1994)). The XenoMouse strains were engineered with yeast artificial chromosomes (YACs) containing 245 kb and 190 kb-sized germline configuration fragments of the human heavy chain locus and kappa light chain locus, respectively, which contained core variable and constant region sequences. The human Ig containing YACs proved to be compatible with the mouse system for both rearrangement and expression of antibodies and were capable of substituting for the inactivated mouse Ig genes. This was demonstrated by their ability to induce B cell development, to produce an adult-like human repertoire of fully human antibodies, and to generate antigen-specific human mAbs. These results also suggested that introduction of larger portions of the human Ig loci containing greater numbers of V genes, additional regulatory elements, and human Ig constant regions might recapitulate substantially the full repertoire that is characteristic of the human humoral response to infection and immunization. The work of Green et al. was extended to the introduction of greater than approximately 80% of the human antibody repertoire through introduction of megabase sized, germline configuration YAC fragments of the human heavy chain loci and kappa light chain loci, respectively. See Mendez et al. Nature Genetics 15:146-156 (1997) and U.S. patent application Ser. No. 08/759,620.

[0368] The production of the XenoMouse model is further discussed and delineated in U.S. patent application Ser. No. 07/466,008, Ser. No. 07/610,515, Ser. No. 07/919,297, Ser. No. 07/922,649, Ser. No. 08/031,801, Ser. No. 08/112,848, Ser. No. 08/234,145, Ser. No. 08/376,279, Ser. No. 08/430,938, Ser. No. 08/464,584, Ser. No. 08/464,582, Ser. No. 08/463,191, Ser. No. 08/462,837, Ser. No. 08/486,853, Ser. No. 08/486,857, Ser. No. 08/486,859, Ser. No. 08/462,513, Ser. No. 08/724,752, Ser. No. 08/759,620; and U.S. Pat. Nos. 6,162,963; 6,150,584; 6,114,598; 6,075,181, and 5,939,598 and Japanese Patent Nos. 3 068 180 B2, 3 068 506 B2, and 3 068 507 B2. See also Mendez et al. Nature Genetics 15:146-156 (1997) and Green and Jakobovits J. Exp. Med. 188:483-495 (1998), EP 0 463 151 B1, WO 94/02602, WO 96/34096, WO 98/24893, WO 00/76310, and WO 03/47336.

[0369] In an alternative approach, others, including GenPharm International, Inc., have utilized a “minilocus” approach. In the minilocus approach, an exogenous Ig locus is mimicked through the inclusion of pieces (individual genes) from the Ig locus. Thus, one or more VH genes, one or more DH genes, one or more JH genes, a mu constant region, and a second constant region (preferably a gamma constant region) are formed into a construct for insertion into an animal. This approach is described in U.S. Pat. No. 5,545,807 to Surani et al. and U.S. Pat. Nos. 5,545,806; 5,625,825; 5,625,126; 5,633,425; 5,661,016; 5,770,429; 5,789,650; 5,814,318; 5,877,397; 5,874,299; and 6,255,458 each to Lonberg and Kay, U.S. Pat. No. 5,591,669 and U.S. Pat. No. 6,023.010 to Krimpenfort and Berns, U.S. Pat. Nos. 5,612,205; 5,721,367; and U.S. Pat. No. 5,789,215 to Berns et al., and U.S. Pat. No. 5,643,763 to Choi and Dunn, and GenPharm International U.S. patent application Ser. No. 07/574,748, Ser. No. 07/575,962, Ser. No. 07/810,279, Ser. No. 07/853,408, Ser. No. 07/904,068, Ser. No. 07/990,860, Ser. No. 08/053,131, Ser. No. 08/096,762, Ser. No. 08/155,301, Ser. No. 08/161,739, Ser. No. 08/165,699, Ser. No. 08/209,741. See also EP 0 546 073 B1, WO 92/03918, WO 92/22645, WO 92/22647, WO 92/22670, WO 93/12227, WO 94/00569, WO 94/25585, WO 96/14436, WO 97/13852, and WO 98/24884 and U.S. Pat. No. 5,981,175. See further Taylor et al. (1992), Chen et al. (1993), Tuaillon et al. (1993), Choi et al. (1993), Lonberg et al. (1994), Taylor et al. (1994), and Tuaillon et al. (1995), Fishwild et al. (1996).

[0370] Kirin has also demonstrated the generation of human antibodies from mice in which, through microcell fusion, large pieces of chromosomes, or entire chromosomes, have been introduced. See European Patent Application Nos. 773 288 and 843 961. Xenerex Biosciences is developing a technology for the potential generation of human antibodies. In this technology, SCID mice are reconstituted with human lymphatic cells, e.g., B and/or T cells. Mice are then immunized with an antigen and can generate an immune response against the antigen. See U.S. Pat. Nos. 5,476,996; 5,698,767; and 5,958,765.

[0371] In some embodiments, the constructs of the invention are “isolated” or “substantially pure” constructs. “Isolated” or “substantially pure”, when used to describe the constructs disclosed herein, means a construct that has been identified, separated and/or recovered from a component of its production environment. Preferably, the construct is free or substantially free of association with all other components from its production environment. Contaminant components of its production environment, such as that resulting from recombinant transfected cells, are materials that could interfere with diagnostic or therapeutic uses for the construct, and may include enzymes, hormones, and other proteinaceous or non-proteinaceous compounds. It is understood that the isolated or substantially pure construct may constitute from 5% to 99.9% by weight of the total protein/polypeptide content in a given sample, depending on the circumstances. The desired construct may be produced at a significantly higher concentration using an inducible promoter or high expression promoter. The definition includes the production of a construct in a wide variety of organisms and/or host cells that are known in the art. In certain embodiments, the construct will be purified (1) to a degree sufficient to obtain at least 15 residues of N-terminal or internal amino acid sequence by use of a spinning cup sequenator, or (2) to homogeneity by SDS-PAGE under non-reducing or reducing conditions using Coomassie Blue or, preferably, silver staining. Usually, however, an isolated construct will be prepared by at least one purification step.

[0372] According to one embodiment, the entire construct and/or the binding domains are in the form of one or more polypeptides or in the form of proteins. In addition to proteinaceous parts, such polypeptides or proteins may include non-proteinaceous parts (e.g. chemical linkers or chemical cross-linking agents such as glutaraldehyde).

[0373] Peptides are short chains of amino acid monomers linked by covalent peptide (amide) bonds. Hence, peptides fall under the broad chemical classes of biological oligomers and polymers. Amino acids that are part of a peptide or polypeptide chain are termed “residues” and can be consecutively numbered. All peptides except cyclic peptides have an N-terminal residue at one end and a C-terminal residue at the other end of the peptide. An oligopeptide consists of only a few amino acids (usually between two and twenty). A polypeptide is a longer, continuous, and unbranched peptide chain. Peptides are distinguished from proteins based on size, and as an arbitrary benchmark can be understood to contain approximately 50 or fewer amino acids. Proteins consist of one or more polypeptides, usually arranged in a biologically functional way. While aspects of the lab techniques applied to peptides versus polypeptides and proteins differ (e.g., the specifics of electrophoresis, chromatography, etc.), the size boundaries that distinguish peptides from polypeptides and proteins are not absolute. Therefore, in the context of the present invention, the terms “peptide”, “polypeptide” and “protein” may be used interchangeably, and the term “polypeptide” is often preferred.

[0374] Polypeptides may further form multimers such as dimers, trimers and higher oligomers, which consist of more than one polypeptide molecule, as mentioned above. Polypeptide molecules forming such dimers, trimers etc. may be identical or non-identical. The corresponding structures of higher order of such multimers are, consequently, termed homo- or heterodimers, homo- or heterotrimers etc. An example for a hereteromultimer is an antibody or immunoglobulin molecule, which, in its naturally occurring form, consists of two identical light polypeptide chains and two identical heavy polypeptide chains. The terms “peptide”, “polypeptide” and “protein” also refer to naturally modified peptides/polypeptides/proteins wherein the modification is accomplished e.g. by post-translational modifications like glycosylation, acetylation, phosphorylation and the like. A “peptide”, “polypeptide” or “protein” when referred to herein may also be chemically modified such as pegylated. Such modifications are well known in the art and described herein below.

[0375] The terms “selectively” and, “preferably, selectively”, “(specifically or immunospecifically) binds to”, “(specifically or immunospecifically) recognizes”, or “(specifically or immunospecifically) reacts with” mean in accordance with this invention that a construct or a binding domain selectively interacts or (immuno-)specifically interacts with a given epitope on the target molecule (antigen), here: CLDN6 and CD3, respectively. This selective interaction or association occurs more frequently, more rapidly, with greater duration, with greater affinity, or with some combination of these parameters, to an epitope on the specific target (here CLDN6) than to alternative substances (non-target molecules, e.g., here CLDN4, CLDN9, CLDN3, etc.). Because of the sequence similarity between homologous proteins in different species, a construct or a binding domain that selectively and/or immunspecifically binds to its target (such as a human target) may, however, cross-react with homologous target molecules from different species (such as, from non-human primates). The terms “selectively binds to”, “specific/immunospecific binding”, etc. can hence include the binding of a construct or binding domain to epitopes or structurally related epitopes in more than one species. In the context of the present invention, a polypeptide of the present invention binds to its respective target structure in a particular manner. Preferably, a polypeptide according to the present invention comprises one paratope per binding domain which specifically or immunospecifically binds to”, “(specifically or immunospecifically) recognizes”, or “(specifically or immunospecifically) reacts with” its respective target structure. This means in accordance with this invention that a polypeptide or a binding domain thereof interacts or (immuno-)specifically interacts with a given epitope on the target molecule (antigen) and CD3, respectively. This interaction or association occurs more frequently, more rapidly, with greater duration, with greater affinity, or with some combination of these parameters, to an epitope on the specific target than to alternative substances (non-target molecules). Because of the sequence similarity between homologous proteins in different species, an antibody construct or a binding domain that immunspecifically binds to its target (such as a human target) may, however, cross-react with homologous target molecules from different species (such as, from non-human primates). The term “specific/immunospecific binding” can hence include the binding of an antibody construct or binding domain to epitopes and/or structurally related epitopes in more than one species. The term “(immuno-) selectively binds does exclude the binding to structurally related epitopes.

[0376] In the context of the present invention, the term “epitope” refers to the part or region of the antigen that is selectively recognized/immunospecifically recognized by the binding structure, i.e. the paratope. An “epitope” is antigenic, and thus the term epitope is sometimes also referred to as “antigenic structure” or “antigenic determinant”. The part of the binding domain that binds to the epitope is called a paratope. Specific binding is believed to be accomplished by specific motifs in the amino acid sequence of the binding domain and the antigen. Thus, binding is achieved because of their primary, secondary and/or tertiary structure as well as the result of potential secondary modifications of said structures. The specific interaction of the paratope with its antigenic determinant may result in a simple binding of said site to the antigen. In some cases, the specific interaction may alternatively or additionally result in the initiation of a signal, e.g. due to the induction of a change of the conformation of the antigen, an oligomerization of the antigen, etc.

[0377] The epitopes of protein antigens are divided into two categories, conformational epitopes and linear epitopes, based on their structure and interaction with the paratope. A conformational epitope is composed of discontinuous sections of the antigen's amino acid sequence. These epitopes interact with the paratope based on the three-dimensional surface features and shape or tertiary structure (folding) of the antigen. Methods of determining the conformation of epitopes include, but are not limited to, x-ray crystallography, two-dimensional nuclear magnetic resonance (2D-NMR) spectroscopy and site-directed spin labelling and electron paramagnetic resonance (EPR) spectroscopy. By contrast, linear epitopes interact with the paratope based on their primary structure. A linear epitope is formed by a continuous sequence of amino acids from the antigen and typically includes at least 3 or at least 4, and more usually, at least 5 or at least 6 or at least 7, for example, about 8 to about 10 amino acids in a unique sequence.

[0378] A method for CLDN6 epitope mapping is described in the following: A pre-defined region (a contiguous amino acid stretch) within the extracellular loops of human CLDN6 protein is exchanged/replaced with a corresponding region of a CLDN6 paralogue (such as human CLDN4 or human CLDN18.2, but other paralogues are also conceivable, so long as the binding domain is not cross-reactive with the paralogue used). These human CLDN6/paralogue chimeras are expressed on the surface of host cells (such as CHO cells). Binding of the antibody or construct can be tested via FACS analysis. When the binding of the antibody or construct to the chimeric molecule is entirely abolished, or when a significant binding decrease is observed, it can be concluded that the region of human CLDN6 which was removed from this chimeric molecule is relevant for the immunospecific epitope-paratope recognition. Said decrease in binding is preferably at least 10%, 20%, 30%, 40%, or 50%; more preferably at least 60%, 70%, or 80%, and most preferably 90%, 95% or even 100% in comparison to the binding to human (wild-type) CLDN6, whereby binding to human CLDN6 is set to be 100%. Alternatively, the above described epitope mapping analysis can be modified by introducing one or several point mutations into the sequence of CLDN6, specifically in the sequences of the extracellular loop 1 or loop 2, more specifically in the sequence corresponding to the E1A and/or E2B regions of these loops that are depicted in SEQ ID NOS: 9 and 10. These point mutations can e.g. reflect the differences between CLDN6 and its closely related paralogue CLDN4.

[0379] A further method to determine the contribution of a specific residue of a target antigen to the recognition by a construct or binding domain is alanine scanning (see e.g. Morrison K L & Weiss G A. Curr Opin Chem Biol. 2001 June; 5(3):302-7), where each residue to be analyzed is replaced by alanine, e.g. via site-directed mutagenesis. Alanine is used because of its non-bulky, chemically inert, methyl functional group that nevertheless mimics the secondary structure references that many of the other amino acids possess. Sometimes bulky amino acids such as valine or leucine can be used in cases where conservation of the size of mutated residues is desired.

[0380] The interaction between the binding domain and the epitope of the target antigen implies that a binding domain exhibits appreciable or significant affinity for the epitope/the target antigen (here: CLDN6 and CD3, respectively) and, generally, does not exhibit significant affinity for proteins or antigens other than the target antigen (here: CLDN6/CD3)—notwithstanding the above discussed cross-reactivity with homologous targets e.g. from other species, or with CLDN9 of the same species, particularly human CLDN6 and CLDN9. “Significant affinity” includes binding with an affinity (dissociation constant, KD) of ≤10-6 M. Preferably, binding is considered specific when the binding affinity is ≤10-7 M, ≤10-8 M, ≤10-9 M, ≤10-10 M, or even ≤10-11 M, or ≤10-12 M. Whether a binding domain (immuno-)specifically reacts with or binds to a target can be tested readily e.g. by comparing the affinity of said binding domain to its desired target protein or antigen with the affinity of said binding domain to non-target proteins or antigens (here: proteins other than CLDN6 or CD3, respectively). Preferably, a construct of the invention does not significantly bind to proteins or antigens other than CLDN6 or CD3, respectively (i.e., the first domain does not bind to proteins other than CLDN6 and the second domain does not bind to proteins other than CD3)—unless any further binding domain(s) directed against a further target is/are deliberately introduced into the construct of the invention, in which case the binding of that binding domain to its specific target is also provided by the present invention.

[0381] It is envisaged that the affinity of the first domain for CLDN6 (e.g. human CLDN6) is ≤100 nM, ≤90 nM, ≤80 nM, ≤70 nM, ≤60 nM, ≤50 nM, ≤40 nM, ≤30 nM, or ≤20 nM. These values are preferably measured in a cell-based assay, such as a Scatchard assay. Other methods of determining the affinity are also well-known. It is furthermore envisaged that the affinity of the second domain for CD3 (e.g. human CD3) is ≤100 nM, ≤90 nM, ≤80 nM, ≤70 nM, ≤60 nM, ≤50 nM, ≤40 nM, ≤30 nM, ≤20 nM, or ≤10 nM. These values are preferably measured in a surface plasmon resonance assay, such as a Biacore assay.

[0382] The term “does not significantly bind” and “does not selectively bind” mean that a construct or binding domain of the present invention does not bind to a protein or antigen other than CLDN6 or CD3, when said protein or antigen is expressed on the surface of a cell. The construct hence shows reactivity of 30%, preferably 20%, more preferably 10%, particularly preferably ≤9%, 8%, ≤7%, 6%, ≤5%, ≤4%, ≤3%, 2%, or ≤1% with proteins or antigens other than CLDN6 or CD3 (when said proteins or antigens are expressed on the surface of a cell), whereby binding to CLDN6 or CD3, respectively, is set to be 100%. The “reactivity” can e.g. be expressed in an affinity value (see above).

[0383] It is envisaged that the construct of the invention (and more specifically the domain comprising a paratope that binds to CLDN6) does not bind or does not significantly bind to CLDN6 paralogues, more specifically to human CLDN6 paralogues and/or to macaque/cyno CLDN6 paralogues. It is also envisaged that the construct does not bind or does not significantly bind to (human or macaque/cyno) CLDN6 paralogues on the surface of a target cell. The CLDN6 paralogues include—but are not limited to CLDN1, CLDN2, CLDN3, CLDN4, CLDN18.1, CLDN18.2, and particularly CLDN9. According to one embodiment, the human paralogues of CLDN6 have sequences as depicted in SEQ ID NOs: 2-8. It is hence envisaged that the first domain of the construct of the invention does not bind or does not significantly selectively bind to CLDN1, CLDN2, CLDN3, CLDN4, CLDN18.1, CLDN18.2, and/or CLDN9 (on the surface of a cell). It is envisaged that the constructs of the present invention substantially do not bind to CLDN9, which is expressed on various organs. Selective binding to CLDN6, and essentially no binding to CLDN9, avoids potential adverse events that could arise by off-target binding.

[0384] One domain comprising a paratope (antigen-binding (epitope-binding) structure) of the polypeptide construct of the invention binds specifically and/or selectively to CLDN6 on the surface of a target cell. The “target cell” can be any prokaryotic or eukaryotic cell expressing CLDN6 on its surface; preferably the target cell is a cell that is part of the human or animal body, such as a specific CLDN6 expressing cancer cell or tumor cell or a cell of a CLDN6 positive neoplasm or an artificially generated CLDN6 expressing cell (the latter may be used, for example, in assays ex vivo). It is understood that the term “on the surface”, in the context of the present invention, means that the first antigen-binding domain of the construct selectively and, preferably, specifically binds to an epitope comprised within the first CLDN6 extracellular loop (CLDN6 ECL1), within the second CLDN6 extracellular loop (CLDN6 ECL2), particularly it binds to an epitope that is formed by a combination of both loops. It is hence envisaged that the domain comprising a paratope (antigen-binding (epitope-binding) structure) of the construct of the invention binds to an epitope formed by one or both extracellular loops of CLDN6, preferably of human CLDN6. The extracellular loop can be the first loop and/or the second loop. It is also particularly envisaged that both loops contribute to the binding. In this case, it is possible that one loop (such as the first loop) represents the main binding partner for the construct, and the other loop (such as the second loop) contributes to the binding, e.g. as a stabilizing partner, but is not essential for the binding. The domain comprising a paratope (antigen-binding (epitope-binding) structure) according to the invention may hence bind to CLDN6 when it is expressed by naturally expressing cells or cell lines (such as human cancer lines OVCAR-3, OAW28, LCLC97TM1, and NCI-H1435), and/or by cells or cell lines transformed or (stably/transiently) transfected with CLDN6. In one embodiment, the domain comprising a paratope (antigen-binding (epitope-binding) structure) that binds to CLDN6 when CLDN6 is used as a target molecule in a cell-based binding assay such as Scatchard. It is furthermore envisaged that the construct/its first domain binds to human CLDN6 on the surface of a target cell. A preferred amino acid sequence for human CLDN6 is depicted in SEQ ID NO: 1.

[0385] It is envisaged that the polypeptide construct according to the invention (and, more specifically, the domain comprising a paratope (antigen-binding (epitope-binding) structure) binding CLDN6 of said construct) binds to the first extracellular loop (ECL1, loop 1) of CLDN6. This does not necessarily exclude that the second extracellular loop also contributes, albeit to a different, e.g. a lesser, extent, to the paratope-eptiope interaction site. The term “CLDN6 ECL” (ECL=extracellular loop) refers to those parts of of CLDN6 which are essentially free of the transmembrane and cytoplasmic domains of CLDN6. It is understood that the transmembrane domains identified for the CLDN6-binding polypeptide of the present invention are identified pursuant to criteria routinely employed in the art for identifying that type of hydrophobic domain. The exact boundaries of a transmembrane domain may vary but most likely by no more than about 5 amino acids at either end of the domain explicitly mentioned herein. A preferred human CLDN6 ECL1 is shown in SEQ ID NO: 9, and a preferred human CLDN6 ECL2 is shown in SEQ ID NO: 10. In one very specific embodiment the construct according to the invention (and, more specifically, the first domain of said construct) binds to the the E1A domain of the first extracellular loop (ECL1, loop 1) and to the E2B domain of the second extracellular loop (ECL2, loop 2) of CLDN6, preferably of human CLDN6, which is advantageously expressed on the surface of a cancer cell or a cell that has been induced to express CLDN6, e.g. human CLDN6, by transformation or transfection, and do not bind to amino acids 138-150 of CLDN6 as depicted in SEQ ID NO: 1.

[0386] The present invention furthermore provides that the domain comprising a paratope (antigen-binding (epitope-binding) structure) of the construct of the invention, preferably selectively, binds to the same epitope of CLDN6 as an antibody or construct comprising a domain which binds to CLDN6 on the surface of a target cell and which comprises:
[0387] a) a VH region comprising a CDR-H1 depicted in SEQ ID NO: 13, a CDR-H2 depicted in SEQ ID NO: 14, and a CDR-H3 depicted in SEQ ID NO: 15, and a VL region comprising a CDR-L1 depicted in SEQ ID NO: 16, a CDR-L2 depicted in SEQ ID NO: 17 and a CDR-L3 depicted in SEQ ID NO: 18;
[0388] b) a VH region comprising a CDR-H1 depicted in SEQ ID NO: 27, a CDR-H2 depicted in SEQ ID NO: 28, and a CDR-H3 depicted in SEQ ID NO: 29, and a VL region comprising a CDR-L1 depicted in SEQ ID NO: 30, a CDR-L2 depicted in SEQ ID NO: 31 and a CDR-L3 depicted in SEQ ID NO: 32;
[0389] c) a VH region comprising a CDR-H1 depicted in SEQ ID NO: 41, a CDR-H2 depicted in SEQ ID NO: 42, and a CDR-H3 depicted in SEQ ID NO: 43, and a VL region comprising a CDR-L1 depicted in SEQ ID NO: 44, a CDR-L2 depicted in SEQ ID NO: 45 and a CDR-L3 depicted in SEQ ID NO: 46;
[0390] d) a VH region comprising a CDR-H1 depicted in SEQ ID NO: 55, a CDR-H2 depicted in SEQ ID NO: 56, and a CDR-H3 depicted in SEQ ID NO: 57, and a VL region comprising a CDR-L1 depicted in SEQ ID NO: 58, a CDR-L2 depicted in SEQ ID NO: 59 and a CDR-L3 depicted in SEQ ID NO: 60;
[0391] e) a VH region comprising a CDR-H1 depicted in SEQ ID NO: 69, a CDR-H2 depicted in SEQ ID NO: 70, and a CDR-H3 depicted in SEQ ID NO: 71, and a VL region comprising a CDR-L1 depicted in SEQ ID NO: 72, a CDR-L2 depicted in SEQ ID NO: 73 and a CDR-L3 depicted in SEQ ID NO: 74;
[0392] f) a VH region comprising a CDR-H1 depicted in SEQ ID NO: 83, a CDR-H2 depicted in SEQ ID NO: 84, and a CDR-H3 depicted in SEQ ID NO: 85, and a VL region comprising a CDR-L1 depicted in SEQ ID NO: 86, a CDR-L2 depicted in SEQ ID NO: 87 and a CDR-L3 depicted in SEQ ID NO: 88;
[0393] g) a VH region comprising a CDR-H1 depicted in SEQ ID NO: 97, a CDR-H2 depicted in SEQ ID NO: 98, and a CDR-H3 depicted in SEQ ID NO: 99, and a VL region comprising a CDR-L1 depicted in SEQ ID NO: 100, a CDR-L2 depicted in SEQ ID NO: 101 and a CDR-L3 depicted in SEQ ID NO: 102;
[0394] h) a VH region comprising a CDR-H1 depicted in SEQ ID NO: 111, a CDR-H2 depicted in SEQ ID NO: 112, and a CDR-H3 depicted in SEQ ID NO: 113, and a VL region comprising a CDR-L1 depicted in SEQ ID NO: 114, a CDR-L2 depicted in SEQ ID NO: 115 and a CDR-L3 depicted in SEQ ID NO: 116;
[0395] i) a VH region comprising a CDR-H1 depicted in SEQ ID NO: 125, a CDR-H2 depicted in SEQ ID NO: 126, and a CDR-H3 depicted in SEQ ID NO: 127, and a VL region comprising a CDR-L1 depicted in SEQ ID NO: 128, a CDR-L2 depicted in SEQ ID NO: 129 and a CDR-L3 depicted in SEQ ID NO: 130;
[0396] j) a VH region comprising a CDR-H1 depicted in SEQ ID NO: 139, a CDR-H2 depicted in SEQ ID NO: 140, and a CDR-H3 depicted in SEQ ID NO: 141, and a VL region comprising a CDR-L1 depicted in SEQ ID NO: 142, a CDR-L2 depicted in SEQ ID NO: 143 and a CDR-L3 depicted in SEQ ID NO: 144;
[0397] k) a VH region comprising a CDR-H1 depicted in SEQ ID NO: 153, a CDR-H2 depicted in SEQ ID NO: 154, and a CDR-H3 depicted in SEQ ID NO: 155, and a VL region comprising a CDR-L1 depicted in SEQ ID NO: 156, a CDR-L2 depicted in SEQ ID NO: 157 and a CDR-L3 depicted in SEQ ID NO: 158;
[0398] l) a VH region comprising a CDR-H1 depicted in SEQ ID NO: 167, a CDR-H2 depicted in SEQ ID NO: 168, and a CDR-H3 depicted in SEQ ID NO: 169, and a VL region comprising a CDR-L1 depicted in SEQ ID NO: 170, a CDR-L2 depicted in SEQ ID NO: 171 and a CDR-L3 depicted in SEQ ID NO: 172;
[0399] m) a VH region comprising a CDR-H1 depicted in SEQ ID NO: 181, a CDR-H2 depicted in SEQ ID NO: 182, and a CDR-H3 depicted in SEQ ID NO: 183, and a VL region comprising a CDR-L1 depicted in SEQ ID NO: 184, a CDR-L2 depicted in SEQ ID NO: 185 and a CDR-L3 depicted in SEQ ID NO: 186;
[0400] n) a VH region comprising a CDR-H1 depicted in SEQ ID NO: 195, a CDR-H2 depicted in SEQ ID NO: 196, and a CDR-H3 depicted in SEQ ID NO: 197, and a VL region comprising a CDR-L1 depicted in SEQ ID NO: 198, a CDR-L2 depicted in SEQ ID NO: 199 and a CDR-L3 depicted in SEQ ID NO: 200;
[0401] o) a VH region comprising a CDR-H1 depicted in SEQ ID NO: 209, a CDR-H2 depicted in SEQ ID NO: 210, and a CDR-H3 depicted in SEQ ID NO: 211, and a VL region comprising a CDR-L1 depicted in SEQ ID NO: 212, a CDR-L2 depicted in SEQ ID NO: 213 and a CDR-L3 depicted in SEQ ID NO: 214;
[0402] p) a VH region comprising a CDR-H1 depicted in SEQ ID NO: 223, a CDR-H2 depicted in SEQ ID NO: 224, and a CDR-H3 depicted in SEQ ID NO: 225, and a VL region comprising a CDR-L1 depicted in SEQ ID NO: 226, a CDR-L2 depicted in SEQ ID NO: 227 and a CDR-L3 depicted in SEQ ID NO: 228;
[0403] q) a VH region comprising a CDR-H1 depicted in SEQ ID NO: 237, a CDR-H2 depicted in SEQ ID NO: 238, and a CDR-H3 depicted in SEQ ID NO: 239, and a VL region comprising a CDR-L1 depicted in SEQ ID NO: 240, a CDR-L2 depicted in SEQ ID NO: 241 and a CDR-L3 depicted in SEQ ID NO: 242;
[0404] r) a VH region comprising a CDR-H1 depicted in SEQ ID NO: 251, a CDR-H2 depicted in SEQ ID NO: 252, and a CDR-H3 depicted in SEQ ID NO: 253, and a VL region comprising a CDR-L1 depicted in SEQ ID NO: 254, a CDR-L2 depicted in SEQ ID NO: 255 and a CDR-L3 as depicted in SEQ ID NO: 256, or
[0405] s) a VH region comprising a CDR-H1 depicted in SEQ ID NO: 265, a CDR-H2 depicted in SEQ ID NO: 266, and a CDR-H3 depicted in SEQ ID NO: 267, and a VL region comprising a CDR-L1 depicted in SEQ ID NO: 268, a CDR-L2 depicted in SEQ ID NO: 269, and a CDR-L3 as depicted in SEQ ID NO: 270, or
[0406] a-1) a VH region as depicted in SEQ ID NO: 11, and a VL region as depicted in SEQ ID NO: 12;
[0407] b-1) a VH region as depicted in SEQ ID NO: 19, and a VL region as depicted in SEQ ID NO: 20;
[0408] c-1) a VH region as depicted in SEQ ID NO: 27, and a VL region as depicted in SEQ ID NO: 28;
[0409] d-1) a VH region as depicted in SEQ ID NO: 35, and a VL region as depicted in SEQ ID NO: 36;
[0410] e-1) a VH region as depicted in SEQ ID NO: 43, and a VL region as depicted in SEQ ID NO: 44;
[0411] f-1) a VH region as depicted in SEQ ID NO: 51, and a VL region as depicted in SEQ ID NO: 52;
[0412] g-1) a VH region as depicted in SEQ ID NO: 59, and a VL region as depicted in SEQ ID NO: 60;
[0413] h-1) a VH region as depicted in SEQ ID NO: 67, and a VL region as depicted in SEQ ID NO: 68;
[0414] i-1) a VH region as depicted in SEQ ID NO: 75, and a VL region as depicted in SEQ ID NO: 76;
[0415] j-1) a VH region as depicted in SEQ ID NO: 83, and a VL region as depicted in SEQ ID NO: 84;
[0416] k-1) a VH region as depicted in SEQ ID NO: 91, and a VL region as depicted in SEQ ID NO: 92;
[0417] l-1) a VH region as depicted in SEQ ID NO: 99, and a VL region as depicted in SEQ ID NO: 100;
[0418] m-1) a VH region as depicted in SEQ ID NO: 107, and a VL region as depicted in SEQ ID NO: 108;
[0419] n-1) a VH region as depicted in SEQ ID NO: 115, and a VL region as depicted in SEQ ID NO: 116;
[0420] o-1) a VH region as depicted in SEQ ID NO: 123, and a VL region as depicted in SEQ ID NO: 124;
[0421] p-1) a VH region as depicted in SEQ ID NO: 131, and a VL region as depicted in SEQ ID NO: 132;
[0422] q-1) a VH region as depicted in SEQ ID NO: 139, and a VL region as depicted in SEQ ID NO: 140; or
[0423] r-1) a VH region as depicted in SEQ ID NO: 147, and a VL region as depicted in SEQ ID NO: 148, or
[0424] s-1) a VH region as depicted in SEQ ID NO: 263, and/or a VL region as depicted in SEQ ID NO: 264.

[0425] In further embodiments, the polypeptide constructs of the present invention comprise a domain binding CLDN6, which comprises any of the CDR regions depicted in SEQ ID NOs: 680 to 694, e.g., heavy chain CDR1 depicted in SEQ ID NO: 680, or heavy chain CDR2 depicted in SEQ ID NO: 681, or heavy chain CDR2 depicted in SEQ ID NO: 682, or heavy chain CDR2 depicted in SEQ ID NO: 683, or heavy chain CDR3 depicted in SEQ ID NO: 684, or heavy chain CDR3 depicted in SEQ ID NO: 685, or heavy chain CDR3 depicted in SEQ ID NO: 686, or heavy chain CDR3 depicted in SEQ ID NO: 687, and/or light chain CDR1 depicted in SEQ ID NO: 688, light chain CDR1 depicted in SEQ ID NO: 689, light chain CDR2 depicted in SEQ ID NO: 690, light chain CDR3 depicted in SEQ ID NO: 691, light chain CDR3 depicted in SEQ ID NO: 692, light chain CDR3 depicted in SEQ ID NO: 693, and light chain CDR3 depicted in SEQ ID NO: 694, or any combinations thereof comprising heavy chain sequences as depicted in SEQ ID NOs: 680 to 687 and/or combinations thereof comprising light chain sequences as depicted in SEQ ID NOs: 688 to 694. A person of skill in the art knows that a binding domain binding CLDN6 may comprise only one of a HCDR1, HCDR2, HCDR3, LCDR1, LCDR2, and LCDR3, which may be present in the combinations according to the invention.

[0426] Other anti-CLDN6 binders were also analyzed for their CLDN6 binding specificities during epitope mapping (see Example 2). These CLDN6×CD3 constructs were found to have a different epitope specificity, and at the same time were shown to have a significantly inferior cytotoxic potential compared with the constructs of the invention. In Example 4, it was demonstrated that the constructs of the present invention display EC50 values in the two-digit picomolar range, while the comparative constructs displayed EC50 values in the three-digit up to the five-digit picomolar range, despite having similar affinities for CLDN6. Constructs displaying cytotoxic activity of the latter range might not be potent enough for a therapeutic use in directing a patient's immune system, more specifically the T cells' cytotoxic activity, against cancer cells. On the other hand, constructs according to the invention present with a very favorable epitope-activity relationship, hence supporting potent construct mediated cytotoxic activity.

[0427] Whether or not an antibody, polypeptide construct or a domain comprising a paratope (antigen-binding (epitope-binding) structure) binds to the same epitope of CLDN6 on the surface of a target cell as another given antibody, construct or binding domain can be measured by different analyses as described herein, e.g. by epitope mapping with chimeric or mutated CLDN6 molecules, as described herein above or in Examples 1 and 2. Other methods of determining epitopes are described herein, such as alanine scanning.

[0428] Whether or not an antibody or polypeptide construct or a domain comprising a paratope (antigen-binding (epitope-binding) structure) competes for binding to an antigen (such as CLDN6) on the surface of a target cell with another given antibody or construct can be measured in a competition assay such as a competitive ELISA. Avidin-coupled microparticles (beads) can also be used. Similarly, to an avidin-coated ELISA plate, when reacted with a biotinylated protein, each of these beads can be used as a substrate on which an assay can be performed. Antigen is coated onto a bead and then precoated with the first antibody. The second antibody is added, and any additional binding is determined. Read-out occurs via flow cytometry. Preferably a cell-based competition assay is used, using either cells that naturally express CLDN6 or cells that were stably or transiently transformed with CLDN6. The term “competes for binding”, in the present context, means that competition occurs between the two tested antibodies of at least 20%, at least 30%, at least 40%, at least 50%, at least 60%, at least 70%, at least 80% or at least 90%, as determined by any one of the assays disclosed above, preferably the cell-based assay. The same analysis can of course be applied for other targets such as CD3.

[0429] Competitive antibody/polypeptide construct binding assays include assays determining the competitive binding of two antibodies/constructs to a cell surface bound antigen. Common methods aim to detect binding of two antibodies/constructs, A and B, to the same antigen on the surface of a cell may include steps of:
[0430] a) blocking of the cell surface antigen by pre-incubation of cells with antibody/polypeptide construct A followed by a sub-maximal addition of labeled antibody/polypeptide construct B and detecting the binding of B compared with binding in the absence of A;
[0431] b) titration (i.e. adding different amounts) of antibody/polypeptide construct A in the presence of sub-maximal amounts of labeled antibody/polypeptide construct B and detecting the effect on binding of B; or
[0432] c) co-titration of A and B, wherein both antibodies/polypeptides/polypeptide constructs are incubated together at maximal concentration and detecting whether the total binding equals or exceeds that of either A or B alone, i.e. a method which cannot be affected by the order of addition or relative amounts of the antibodies/constructs.

[0433] When two antibodies/polypeptides/polypeptide constructs A and B compete for a cell surface bound antigen, the antibodies will very often compete in blocking assays independently from the order of the addition of the antibodies. In other words, competition is detected if the assay is carried out in either direction. However, this is not always the case, and under certain circumstances the order of the addition of the antibodies or the direction of the assay may influence the signal generated. This may be due to differences in affinities or avidities of the potentially competing antibodies/constructs. If the order of the addition has a significant effect on the signal generated, it is concluded that the two antibodies/constructs do compete if competition is detected in at least one order.

[0434] In the context of the present invention, the term “variable” refers to those portions of antibody or immunoglobulin domains that exhibit variability in their sequence and that are involved in determining the specificity and binding affinity of a particular antibody (i.e., the “variable region(s)”). Usually, the pairing of a heavy chain variable region (VH) and a light chain variable region (VL) together forms a single antigen-binding site.

[0435] Variability is not evenly distributed throughout the variable regions of antibodies; it is concentrated in sub-domains of each of the heavy and light chain variable regions. These sub-domains are called “hypervariable regions” or “complementarity determining regions” (CDRs). The more conserved (i.e., non-hypervariable) portions of the variable regions are called the “framework” (FR) regions and provide a scaffold for the six CDRs in three-dimensional space to form an antigen-binding surface. The variable regions of naturally occurring antibody heavy and light chains each comprise four FR regions (FR1, FR2, FR3, and FR4), largely adopting a f-sheet configuration. Together with the CDRs, they form the following sequence within a variable heavy or light chain: FR1-CDR1-FR2-CDR2-FR3-CDR3-FR4. The hypervariable regions in each chain are held together by the framework regions and, usually together with the hypervariable regions from the other chain, contribute to the formation of the antigen-binding site (see Kabat et al., loc. cit.). As used herein, the polypeptides/polypeptide constructs of the invention may have modifications in the framework region. These modifications may be substitutions of one or more amino residue of the herein disclosed sequences by other amino acid residues. Further modifications that are possible are deletions, inversions, additions of amino acid residues if these modifications do not prevent the selective binding of the polypeptides/polypeptide constructs to CLDN6 and/or the as long as these modifications do not prevent the selective binding of the polypeptides/polypeptide constructs to CLDN6-expressing target cells and the constructs' ability to engage and activate T cells and induce T cell-mediated cytotoxicity. Accordingly, the modifications of the framework regions of the herein disclosed constructs still allow an at least 100%, at least 99%, at least 98%, at least 97%, at least 96%, at least 95%, at least 94%, at least 93%, at least 92%, at least 91%, at least 90%, at least 89%, at least 88%, at least 87%, at least 86%, at least 85%, at least 84%, at least 83%, at least 82%, at least 81%, at least 80%, at least 79%, at least 78%, at least 77%, at least 76%, at least 75%, at least 74%, at least 73%, at least 72%, at least 71%, at least 70%, at least 65%, at least 60%, at least 55%, at least 50%, at least 45%, at least 40%, at least 35%, at least 30%, at least 25%, at least 20%, at least 15%, at least 10%, at least 5% ability to engage T cells and induce T cell-mediated cytotoxicity when compared with a non-framework-modified antibody. Modifications in the framework regions may also be associated with a higher activity than the non-modified constructs. It is also contemplated to modify the framework regions of the constructs of the present invention for purposes such as increasing the solubility of the construct in a given medium, to increase the stability of the construct, and the like.

[0436] The terms “CDR”, and its plural “CDRs”, refer to the complementarity determining region of which three make up the binding character of a light chain variable region (CDR-L1, CDR-L2 and CDR-L3) and three make up the binding character of a heavy chain variable region (CDR-H1, CDR-H2 and CDR-H3). CDRs contain most of the residues responsible for specific interactions of antibodies (or constructs or binding domain) with an antigen and hence contribute to the functional activity of an antibody molecule: they are the main determinants of antigen specificity.

[0437] The exact definition of CDR boundaries and lengths is subject to different classification and numbering systems. CDRs may therefore be referred to by Kabat, Chothia, contact or any other boundary definitions, including the numbering system described herein. Despite differing boundaries, each of these systems has some degree of overlap in what constitutes the so called “hypervariable regions” within the variable sequences. CDR definitions according to these systems may therefore differ in length and boundary areas with respect to the adjacent framework region. See for example Kabat (an approach based on cross-species sequence variability), Chothia (an approach based on crystallographic studies of antigen-antibody complexes), and/or MacCallum (Kabat et al., loc. cit.; Chothia et al., J. MoI. Biol, 1987, 196: 901-917; and MacCallum et al., J. MoI. Biol, 1996, 262: 732). Still another standard for characterizing the antigen binding site is the AbM definition used by Oxford Molecular's AbM antibody modeling software. See, e.g., Protein Sequence and Structure Analysis of Antibody Variable Domains. In: Antibody Engineering Lab Manual (Ed.: Duebel, S. and Kontermann, R., Springer-Verlag, Heidelberg). To the extent that two residue identification techniques define regions of overlapping, but not identical regions, they can be combined to define a hybrid CDR. However, the numbering in accordance with the so-called Kabat system is preferred.

[0438] Typically, CDRs form a loop structure that can be classified as a canonical structure. The term “canonical structure” refers to the main chain conformation that is adopted by the antigen binding (CDR) loops. From comparative structural studies, it has been found that five of the six antigen binding loops have only a limited repertoire of available conformations. Each canonical structure can be characterized by the torsion angles of the polypeptide backbone. Corresponding loops between antibodies may, therefore, have very similar three-dimensional structures, despite high amino acid sequence variability in most parts of the loops (Chothia and Lesk, J. Mol. Biol., 1987, 196: 901; Chothia et al., Nature, 1989, 342: 877; Martin and Thornton, J. Mol. Biol, 1996, 263: 800). Furthermore, there is a relationship between the adopted loop structure and the amino acid sequences surrounding it. The conformation of a particular canonical class is determined by the length of the loop and the amino acid residues residing at key positions within the loop, as well as within the conserved framework (i.e., outside of the loop). Assignment to a particular canonical class can therefore be made based on the presence of these key amino acid residues.

[0439] The term “canonical structure” may also include considerations as to the linear sequence of the antibody, for example, as catalogued by Kabat (Kabat et al., loc. cit.). The Kabat numbering scheme (system) is a widely adopted standard for numbering the amino acid residues of an antibody variable region in a consistent manner and is the preferred scheme applied in the present invention as also mentioned elsewhere herein. Additional structural considerations can also be used to determine the canonical structure of an antibody. For example, those differences not fully reflected by Kabat numbering can be described by the numbering system of Chothia et al. and/or revealed by other techniques, for example, crystallography and two- or three-dimensional computational modeling. Accordingly, a given antibody sequence may be placed into a canonical class which allows for, among other things, identifying appropriate class sequences (e.g., based on a desire to include a variety of canonical structures in a library). Kabat numbering of antibody amino acid sequences and structural considerations as described by Chothia et al., loc. cit. and their implications for construing canonical aspects of antibody structure, are described in the literature. The subunit structures and three-dimensional configurations of different classes of immunoglobulins are well known in the art. For a review of the antibody structure, see Antibodies: A Laboratory Manual, Cold Spring Harbor Laboratory, eds. Harlow et al., 1988.

[0440] The CDR3 of the light chain and, particularly, the CDR3 of the heavy chain may constitute the most important determinants in antigen binding within the light and heavy chain variable regions. In some antibodies or constructs/binding domains, the heavy chain CDR3 appears to constitute the major area of contact between the antigen and the antibody. In vitro selection schemes in which CDR3 alone is varied can be used to vary the binding properties of an antibody or construct/binding domain or determine which residues contribute to the binding of an antigen. Hence, CDR3 is typically the greatest source of molecular diversity within the antibody binding site. CDR-H3, for example, can be as short as two amino acid residues or greater than 26 amino acids.

[0441] In a classical full-length antibody or immunoglobulin, each light (L) chain is linked to a heavy (H) chain by one covalent disulfide bond, while the two H chains are linked to each other by one or more disulfide bonds depending on the H chain isotype. The heavy chain constant (CH) domain most proximal to VH is usually designated as CH1. The constant (“C”) domains are not directly involved in antigen binding, but exhibit various effector functions, such as antibody-dependent cell-mediated cytotoxicity (ADCC) and complement activation (complement dependent cytotoxicity, CDC). The Fc region of an antibody is the “tail” region of a classical antibody that interacts with cell surface receptors called Fc receptors and some proteins of the complement system. In IgG, IgA and IgD antibody isotypes, the Fc region is composed of two identical protein fragments, derived from the second and third constant domains (CH2 and CH3) of the antibody's two heavy chains. IgM and IgE Fc regions contain three heavy chain constant domains (CH2, CH3 and CH4) in each polypeptide chain. The Fc regions also contains part of the so-called “hinge” region held together by one or more disulfides and noncovalent interactions. The Fc region of a naturally occurring IgG bears a highly conserved N-glycosylation site. Glycosylation of the Fc fragment is essential for Fc receptor-mediated activity.

[0442] ADCC is a mechanism of cell-mediated immune defense whereby an effector cell of the immune system actively lyses a target cell, whose membrane-surface antigens have been bound by specific antibodies. ADCC requires an immune effector cell which classically is known to be a natural killer (NK) cell that typically interacts with IgG antibodies. However, ADCC can also be mediated by macrophages, neutrophils and eosinophils. Naturally occurring ADCC involves activation of effector cells expressing Fc receptors by antibodies expressing an Fc portion. For example, the most common Fc receptor on the surface of an NK cell is calles CD16 or FcγRIII. Once the Fc receptor binds to the Fc region of IgG, the NK cell releases cytotoxic factors that cause the death of the target cell. Likewise, the Fc receptor (FceRI) of an eosinophil will recognize IgE. In CDC, in contrast, the molecule “C1q” of the complement system binds to the antibody Fc region, and this binding triggers the complement cascade which leads to the formation of the membrane attack complex (MAC) at the surface of the target cell, as a result of the classical pathway complement activation. In therapeutic antibodies, both ADCC and CDC can be modulated by Fc isotype engineering, Fc genetic mutations, or Fc glycosylation profile modifications. As used herein, the polypeptides/polypeptide constructs of the present invention are not inducing ADCC as commonly understood. Instead, the polypeptides can engage T cells and induce T cell-mediated cytotoxicity, e.g. by secretion of perforin and/or inducing apoptosis.

[0443] The sequence of antibody genes after assembly and somatic mutation is highly varied, and these varied genes are estimated to encode 1010 different antibody molecules (Immunoglobulin Genes, 2nd ed., eds. Jonio et al., Academic Press, San Diego, CA, 1995). Accordingly, the immune system provides a repertoire of immunoglobulins. The term “repertoire” refers to at least one nucleotide sequence derived wholly or partially from at least one sequence encoding at least one immunoglobulin. The sequence(s) may be generated by rearrangement in vivo of the V, D, and J segments of heavy chains, and the V and J segments of light chains. Alternatively, the sequence(s) can be generated from a cell in response to which rearrangement occurs, e.g., in vitro stimulation. Alternatively, part or all the sequence(s) may be obtained by DNA splicing, nucleotide synthesis, mutagenesis, and other methods, see, e.g., U.S. Pat. No. 5,565,332. A repertoire may include only one sequence or may include a plurality of sequences, including ones in a genetically diverse collection.

[0444] It is envisaged that the polypeptide construct of the invention has a cysteine clamp within the first domain. This cysteine clamp may be introduced to improve stability of the construct. See e.g. US 2016/0193295.

[0445] In one embodiment of the invention, the CLDN6-binding paratope (antigen-binding (epitope-binding) structure) of one domain of the construct of the invention comprises a VH region having an amino acid sequence as depicted in SEQ ID NO: 11, SEQ ID NO: 25, SEQ ID NO: 39, SEQ ID NO: 67, or SEQ ID NO: 193.

[0446] In a further embodiment, the CLDN6-specific paratope, i.e. the antigen-binding (epitope-binding) domain of the construct of the invention comprises a VL region having an amino acid sequence as depicted in SEQ ID NO: 12, SEQ ID NO: 26, SEQ ID NO: 40, SEQ ID NO: 68, or SEQ ID NO: 194.

[0447] In another embodiment, the CLDN6-specific paratope, i.e. the antigen-binding (epitope-binding) domain of the construct of the invention comprises a VH region and a VL region having an amino acid sequence as depicted in SEQ ID NOs: 11+12 (VH+VL), SEQ ID NOs: 25+26, SEQ ID NOs: 39+40, SEQ ID NOs: 67+68, or SEQ ID NOs: 193+194 (VH+VL).

[0448] In yet a further embodiment, the CLDN6-specific paratope, i.e. the antigen-binding (epitope-binding) domain of the construct of the invention comprises a polypeptide having an amino acid sequence as depicted in SEQ ID NO: 19, SEQ ID NO: 22, SEQ ID NO: 33, SEQ ID NO: 36, SEQ ID NO: 47, SEQ ID NO: 50, SEQ ID NO: 76, SEQ ID NO: 78, SEQ ID NO: 201, or SEQ ID NO: 204, particularly SEQ ID NOs: 19 and 22.

[0449] As described herein above, the invention provides an embodiment wherein the polypeptide construct is in a format selected from the group consisting of (scFv)2, scFv-single domain mAb, diabodies and oligomers of any of the aforementioned formats. The term “is in a format” does not exclude that the construct can be further modified, e.g. by attachment or fusion to other moieties, as described herein. According to one embodiment of the polypeptide construct of the present invention, the domains comprising the herein described paratopes are in the format of an scFv. In an scFv, the VH region and the and VL region are arranged in the order VH-VL or VL-VH (from N- to C-terminus). It is envisaged that the VH and the VL regions of the domains comprising the herein described paratopes are connected via a linker, preferably a peptide linker. According to one embodiment of the domains comprising the herein described paratopes, the VH-region is positioned N-terminally of the linker, and the VL-region is positioned C-terminally of the linker. In other words, in one embodiment of the domains comprising the herein described paratopes, the scFv comprises from the N-terminus to the C-terminus: VH-linker-VL. It is furthermore envisaged that the domains comprising the herein described paratopes of the construct are connected via a linker, preferably a peptide linker. The construct may e.g. comprise the domains in the order (from N-terminus to C-terminus) one domain—linker—second further domain. The inverse order (further domain—linker—first domain) is also possible.

[0450] The linkers are preferably peptide linkers, more preferably short peptide linkers. In accordance with the present invention, a “peptide linker” comprises an amino acid sequence which connects the amino acid sequences of one domain with another (variable and/or binding) domain (e.g. a variable domain or a binding domain) of the construct. An essential technical feature of such peptide linker is that it does not comprise any polymerization activity. Among the suitable peptide linkers are those described in U.S. Pat. Nos. 4,751,180 and 4,935,233 or WO 88/09344. The peptide linkers can also be used to attach other domains or modules or regions (such as half-life extending domains) to the construct of the invention. Examples of useful peptide linkers are shown in SEQ ID NOs: 563-575 and SEQ ID NO: 679. In the present context, a “short” linker has between 2 and 50 amino acids, preferably between 3 and 35, between 4 and 30, between 5 and 25, between 6 and 20, or between 6 and 17 amino acids. The linker between two variable regions of one binding domain may have a different length (e.g. may be longer) than the linker between the two binding domains. For example, the linker between two variable regions of one binding domain may have a length between 7 and 15 amino acids, preferably between 9 and 13, and the linker between the two binding domains may have a length between 3 and 10 amino acids, preferably between 4 and 8. It is further envisaged that the peptide linkers are glycine/serine linkers, such as those depicted in SEQ ID NOs: 563-575 and SEQ ID NO: 679. Most of the amino acids in glycine/serine linkers are selected from glycine and serine.

[0451] If a linker is used, this linker is preferably of a length and sequence to ensure that each of the first and second domains can, independently from one another, retain their differential binding specificities. For peptide linkers which connect the at least two binding domains (or the two variable regions forming one binding domain) in the construct, those peptide linkers are envisaged which comprise only a few amino acid residues, e.g. 12 amino acid residues or less. Thus, peptide linkers of 12, 11, 10, 9, 8, 7, 6 or 5 amino acid residues are preferred. An envisaged peptide linker with less than 5 amino acids comprises 4, 3, 2 or one amino acid(s), wherein Gly-rich linkers are preferred. A “single amino acid” linker in the context of said “peptide linker” is Gly. Another embodiment of a peptide linker is characterized by the amino acid sequence Gly-Gly-Gly-Gly-Ser, i.e. Gly4Ser (SEQ ID NO: 563), or polymers thereof, i.e. (Gly4Ser)x, where x is an integer of 1 or greater (e.g. 2 or 3). Usable linkers are depicted in SEQ ID NOs: 563-575 and SEQ ID NO: 679. The characteristics of said peptide linkers are known in the art and are described e.g. in Dall'Acqua et al. (Biochem. (1998) 37, 9266-9273), Cheadle et al. (Mol Immunol (1992) 29, 21-30) and Raag and Whitlow (FASEB (1995) 9(1), 73-80). Peptide linkers which do not promote any secondary structures are preferred. The linkage of said domains to each other can be provided, e.g., by genetic engineering. Methods for preparing fused and operatively linked bispecific single chain constructs and expressing them in mammalian cells or bacteria are well-known in the art (e.g. WO 99/54440 or Sambrook et al., Molecular Cloning: A Laboratory Manual, Cold Spring Harbor Laboratory Press, Cold Spring Harbor, New York, 2001).

[0452] According to one embodiment of the invention, the polypeptide construct of the invention is a “single chain construct”. It is also envisaged that either the first or the second or both binding domains may be in the format of a “single chain Fv” (scFv). Although the two domains of the Fv fragment, VL and VH, are coded for by separate genes, they can be joined, using recombinant methods, by an artificial linker—as described hereinbefore—that enables them to be made as a single protein chain in which the VL and VH regions pair to form a monovalent molecule; see e.g., Huston et al. (1988) Proc. Natl. Acad. Sci USA 85:5879-5883). These antibody fragments are obtained using conventional techniques known to those with skill in the art, and the fragments are evaluated for function in the same manner as are full-length antibodies or IgGs. A single-chain variable fragment (scFv) is hence a fusion protein of the variable region of the heavy chain (VH) and of the light chain (VL) of immunoglobulins, usually connected with a short linker peptide. The linker is usually rich in glycine for flexibility, as well as serine or also threonine for solubility, and can either connect the N-terminus of the VH with the C-terminus of the VL, or vice versa. This protein retains the specificity of the original immunoglobulin, despite removal of the constant regions and introduction of the linker.

[0453] Bispecific single chain molecules are known in the art and are described in WO 99/54440, Mack, J. Immunol. (1997), 158, 3965-3970, Mack, PNAS, (1995), 92, 7021-7025, Kufer, Cancer Immunol. Immunother., (1997), 45, 193-197, Löffler, Blood, (2000), 95, 6, 2098-2103, Brdhl, Immunol., (2001), 166, 2420-2426, Kipriyanov, J. Mol. Biol., (1999), 293, 41-56. Techniques described for producing single chain constructs (see, inter alia, U.S. Pat. No. 4,946,778, Kontermann and Dübel (2010), loc. cit. and Little (2009), loc. cit.) can be adapted to produce single chain constructs selectively and, preferably, specifically recognizing (an) elected target(s).

[0454] Bivalent (also called divalent) or bispecific single-chain variable fragments (bi-scFvs or di-scFvs) having the format (scFv)2 can be engineered by linking two scFv molecules (e.g. with linkers as described hereinbefore). The linking can be done by producing a single polypeptide chain with two VH regions and two VL regions, yielding tandem scFvs (see e.g. Kufer, P. et al., (2004) Trends in Biotechnology 22(5):238-244). Another possibility is the creation of scFv molecules with linker peptides that are too short for the two variable regions to fold together (e.g. about five amino acids), forcing the scFvs to dimerize. In this case, the VH and th VL of a binding domain (binding either to the target antigen CLDN6 or to CD3) are not directly connected via a peptide linker. Thus, the VH of the CD3 binding domain may e.g. be fused to the VL of the CLDN6 binding domain via a peptide linker, and the VH of the CLDN6 binding domain is fused to the VL of the CD3 binding domain via such peptide linker. This type is known as diabodies (see e.g. Hollinger, Philipp et al., (July 1993) Proceedings of the National Academy of Sciences of the United States of America 90 (14): 6444-8).

[0455] Constructs denominated “single domain constructs” (or occasionally “antibody constructs”) comprise one (monomeric) antibody variable region which can bind selectively to a specific antigen, independently of other variable regions. The first single domain antibodies were engineered from heavy chain antibodies found in camelids, and these are called VHH fragments. Cartilaginous fishes also have heavy chain antibodies (IgNAR) from which single domain antibodies called VNAR fragments can be obtained. An alternative approach is to split the dimeric variable regions from common immunoglobulins into monomers, hence obtaining VH or VL as a single domain Ab. Although most research into single domain antibodies is currently based on heavy chain variable regions, nanobodies derived from light chains were also shown to bind specifically to target epitopes. Examples of single domain antibodies are called sdAb, nanobodies or single variable domain antibodies. A (single domain mAb)2 is hence a monoclonal construct composed of (at least) two single domain monoclonal constructs, which are individually selected from the group comprising VH, VL, VHH and VNAR. The linker is preferably in the form of a peptide linker. Similarly, an “scFv-single domain mAb” is a monoclonal construct composed of at least one single domain antibody as described above and one scFv molecule as described above. Again, the linker is preferably in the form of a peptide linker.

[0456] It is also envisaged that the polypeptide construct of the invention has, in addition to its function to bind to the target molecules CLDN6 and CD3, a further function. In this format, the construct may be a trifunctional or multifunctional construct by targeting target cells through CLDN6 binding, mediating cytotoxic T cell activity through CD3 binding and providing a further function such as means or domains to enhance or extend serum half-life, a fully functional or modified Fc constant domain mediating cytotoxicity through recruitment of effector cells, a label (fluorescent etc.), a therapeutic agent such as a toxin or radionuclide, etc.

[0457] Examples for means or domains to extend serum half-life of the polypeptides/polypeptide constructs of the invention include peptides, proteins or domains of proteins, which are fused or otherwise attached to the polypeptides/polypeptide constructs. The group of peptides, proteins or protein domains includes peptides binding to other proteins with preferred pharmacokinetic profile in the human body such as serum albumin (see WO 2009/127691). An alternative concept of such half-life extending peptides includes peptides binding to the neonatal Fc receptor (FcRn, see WO 2007/098420), which can also be used in the constructs of the present invention. The concept of attaching larger domains of proteins or complete proteins includes the fusion of human serum albumin, variants or mutants of human serum albumin (see WO 2011/051489, WO 2012/059486, WO 2012/150319, WO 2013/135896, WO 2014/072481, WO 2013/075066) or domains thereof, as well as the fusion of an immunoglobulin constant region (Fc domain) and variants thereof. Such variants of Fc domains are called Fc-based domains and may e.g. be optimized/modified to allow the desired pairing of dimers or mulimers, to abolish Fc receptor binding (e.g. to avoid ADCC or CDC) or for other reasons. A further concept known in the art to extend the half-life of substances or molecules in the human body is the pegylation of those molecules (such as the constructs of the present invention).

[0458] In one embodiment, the polypeptides/polypeptide constructs according to the invention are linked (e.g. via peptide bond) with a fusion partner (such as a protein, polypeptide or peptide), e.g. for extending the construct's serum half-life. These fusion partners can be selected from human serum albumin (“HSA” or “HALB”) as wells as sequence variants thereof, peptides binding to HSA, peptides binding to FcRn (“FcRn BP”), or constructs comprising an (antibody derived) Fc region. Exemplary sequences of these fusion partners are depticed in SEQ ID NOs: 576-637. In general, the fusion partners may be linked to the N-terminus or to the C-terminus of the constructs according to the invention, either directly (e.g. via peptide bond) or through a peptide linker such as (GGGGS)n (wherein “n” is an integer of 2 or greater, e.g. 2 or 3 or 4). Suitable peptide linkers are discussed above and are shown in SEQ ID NOs: 563-575.

[0459] Hence, it is envisaged that a polypeptide construct according to the present invention comprises a polypeptide comprising in the following order from N-terminus to C-terminus:
[0460] a) VL (comprising part of the CLDN6 binding paratope)—(G4S)3—VH (comprising part of the CLDN6 binding paratope)—Peptide linker (SG4S)—VH (comprising part of the CD3 binding paratope)—(G4S)3—VL (comprising part of the CD3 binding paratope)—Peptide linker (G4)—Fc monomer (part of the HLE domain)—(G4S)6—Fc monomer (part of the HLE domain); or
[0461] b) VH (comprising part of the CLDN6 binding paratope)—(G4S)3—VL (comprising part of the CLDN6 binding paratope)—Peptide linker (SG4S)—VH (comprising part of the CD3 binding paratope)—(G4S)3—VL (comprising part of the CD3 binding paratope)—Peptide linker (G4)—Fc monomer (part of the HLE domain)—(G4S)6—Fc monomer (part of the HLE domain).

[0462] Hence, it is envisaged that a polypeptide construct according to the present invention comprises:
[0463] (a) a polypeptide comprising in the following order from N-terminus to C-teminus:
   [0464] a polypeptide having an amino acid sequence selected from the group consisting of SEQ ID NO: 12, SEQ ID NO: 26, SEQ ID NO: 40, SEQ ID NO: 68, and SEQ ID NO: 194;
   [0465] a peptide linker having an amino acid sequence selected from the group consisting of SEQ ID NO: 563, which can be replaced by any one of SEQ ID NOs: 564-575; or 679; and
   [0466] a polypeptide having an amino acid sequence selected from the group consisting of SEQ ID NO: 11, SEQ ID NO: 25, SEQ ID NO: 39, SEQ ID NO: 67, and SEQ ID NO: 193;
[0467] (b) a polypeptide comprising in the following order from N-terminus to C-teminus:
   [0468] a polypeptide having an amino acid sequence selected from the group consisting of SEQ ID NO: 11, SEQ ID NO: 25, SEQ ID NO: 39, SEQ ID NO: 67, and SEQ ID NO: 193
   [0469] a peptide linker having an amino acid sequence selected from the group consisting of SEQ ID NO: 563, which can be replaced by any one of SEQ ID NOs: 564-575; or 679; and
   [0470] a polypeptide having an amino acid sequence selected from the group consisting of SEQ ID SEQ ID NO: 12, SEQ ID NO: 26, SEQ ID NO: 40, SEQ ID NO: 68, and SEQ ID NO: 194;
[0471] (c) a polypeptide comprising in the following order from N-terminus to C-teminus:
   [0472] a polypeptide having an amino acid sequence selected from the group consisting of SEQ ID NO: 12 and SEQ ID NO: 194, particularly SEQ ID NO: 12;
   [0473] a peptide linker having an amino acid sequence selected from the group consisting of SEQ ID NO: 563, which can be replaced by any one of SEQ ID NOs: 564-575; or 679; and
   [0474] a polypeptide having an amino acid sequence selected from the group consisting of SEQ ID NO: 11 and SEQ ID NO: 193, particularly SEQ ID NO: 11;
[0475] (d) a polypeptide comprising in the following order from N-terminus to C-teminus:
   [0476] a polypeptide having an amino acid sequence selected from the group consisting of SEQ ID NO: 25, SEQ ID NO: 39, and SEQ ID NO: 67,
   [0477] a peptide linker having an amino acid sequence selected from the group consisting of SEQ ID NO: 563, which can be replaced by any one of SEQ ID NOs: 564-575; and 679; and
   [0478] a polypeptide having an amino acid sequence selected from the group consisting of SEQ ID NO: 26, SEQ ID NO: 40, and SEQ ID NO: 68;
[0479] (e) a polypeptide comprising in the following order from N-terminus to C-teminus:
   [0480] a polypeptide having an amino acid sequence selected from the group consisting of SEQ ID NO: 12, SEQ ID NO: 26, SEQ ID NO: 40, SEQ ID NO: 68, and SEQ ID NO: 194;
   [0481] a peptide linker having an amino acid sequence selected from the group consisting of SEQ ID NO: 563, which can be replaced by any one of SEQ ID NOs: 564-575; or 679; and
   [0482] a polypeptide having an amino acid sequence selected from the group consisting of SEQ ID NO: 11, SEQ ID NO: 25, SEQ ID NO: 39, SEQ ID NO: 67, and SEQ ID NO: 193;
[0483] (f) a polypeptide comprising in the following order from N-terminus to C-teminus:
   [0484] a polypeptide having an amino acid sequence selected from the group consisting of SEQ ID NO: 12, SEQ ID NO: 26, SEQ ID NO: 40, SEQ ID NO: 68, and SEQ ID NO: 194;
   [0485] a peptide linker having an amino acid sequence selected from the group consisting of SEQ ID NO: 563, which can be replaced by any one of SEQ ID NOs: 564-575; or 679; and
   [0486] a polypeptide having an amino acid sequence selected from the group consisting of SEQ ID NO: 11, SEQ ID NO: 25, SEQ ID NO: 39, SEQ ID NO: 67, and SEQ ID NO: 193;
   [0487] a peptide linker having an amino acid sequence selected from the group consisting of SEQ ID NO: 565, which can be replaced by any one of SEQ ID NOs: 563, 564, 566-575; or 679; and
   [0488] a polypeptide having an amino acid sequence selected from the group consisting of SEQ ID NO: 19, 22, 33, 36, 47, 50, 75, 78, 201, and 204, particularly 19, and 22;
[0489] (g) a polypeptide comprising in the following order from N-terminus to C-teminus:
   [0490] a polypeptide having an amino acid sequence selected from the group consisting of SEQ ID NO: 11, SEQ ID NO: 25, SEQ ID NO: 39, SEQ ID NO: 67, and SEQ ID NO: 193
   [0491] a peptide linker having an amino acid sequence selected from the group consisting of SEQ ID NO: 563, which can be replaced by any one of SEQ ID NOs: 564-575; or 679; and
   [0492] a polypeptide having an amino acid sequence selected from the group consisting of SEQ ID SEQ ID NO: 12, SEQ ID NO: 26, SEQ ID NO: 40, SEQ ID NO: 68, and SEQ ID NO: 194
   [0493] a peptide linker having an amino acid sequence selected from the group consisting of SEQ ID NO: 565, which can be replaced by any one of SEQ ID NOs: 563, 564, 566-575; or 679; and
   [0494] a polypeptide having an amino acid sequence selected from the group consisting of SEQ ID NO: 19, 22, 33, 36, 47, 50, 75, 78, 201, and 204, particularly 19, and 22.

[0495] According to another embodiment, the construct of the invention comprises (in addition to the domains comprising the herein described paratopes binding CLDN6 and CD3) an additional domain which comprises two polypeptide monomers, each comprising a hinge, a CH2 and a CH3 domain, wherein said two polypeptide monomers are fused to each other via a peptide linker. It is envisaged that said third domain comprises in N-terminal to C-terminal order: hinge-CH2-CH3-linker-hinge-CH2-CH3. Amino acid sequences that can be used for said third domain are depicted in SEQ ID NOs: 581-637. Each of said polypeptide monomers can have an amino acid sequence that is selected from the group consisting of SEQ ID NOs: 630-637, or that is at least 90% identical to those sequences.

[0496] One preferred polypeptide monomer is depicted in SEQ ID NO: 622, and a preferred third domain is depicted in SEQ ID NO: 630.

[0497] In another embodiment, the first and second domains of the construct of the invention are fused to the third domain via a peptide linker which is for example selected from the group consisting of SEQ ID NO: 563, 564, 565, 566, 567, 568, 569, 570, 571, 572, 573, 574, and 575 and SEQ ID NO: 679.

[0498] In line with the present invention, a “hinge” is an IgG hinge region. This region can be identified by analogy using the Kabat numbering, see e.g. Kabat positions 223-243. In line with the above, the minimal requirement for a “hinge” are the amino acid residues corresponding to the IgG1 sequence stretch of D231 to P243 according to the Kabat numbering. The terms “CH2” and “CH3” refer to the immunoglobulin heavy chain constant regions 2 and 3. These regions can as well be identified by analogy using the Kabat numbering, see e.g. Kabat positions 244-360 for CH2 and Kabat positions 361-478 for CH3. Is is understood that there is some variation between the immunoglobulins in terms of their IgG1 Fc region, IgG2 Fc region, IgG3 Fc region, IgG4 Fc region, IgM Fc region, IgA Fc region, IgD Fc region and IgE Fc region (see, e.g., Padlan, Molecular Immunology, 31(3), 169-217 (1993)). The term Fc region refers to the last two heavy chain constant regions of IgA, IgD, and IgG, and the last three heavy chain constant regions of IgE and IgM. The Fc region can also include the flexible hinge N-terminal to these domains. For IgA and IgM, the Fc region may include the J chain. For IgG, the Fc region comprises immunoglobulin domains CH2 and CH3 and the hinge between the first two domains and CH2. Although the boundaries of the Fc region of an immunoglobulin may vary, an example for a human IgG heavy chain Fc portion comprising a functional hinge, CH2 and CH3 domain can be defined e.g. to comprise residues D231 (of the hinge domain) to P476 (of the C-terminus of the CH3 domain), or D231 to L476, respectively, for IgG4, wherein the numbering is according to Kabat.

[0499] The polypeptide construct of the invention may hence comprise in an N- to C-terminal order:
[0500] (a) one domain comprising a paratope (antigen-binding (epitope-binding) structure) binding an epitope of CLDN6;
[0501] (b) a peptide linker having an amino acid sequence selected from the group consisting of SEQ ID NOs: 563-575, particularly 563, 568, 570 to 575, more particularly SEQ ID NO: 570;
[0502] (c) another domain comprising a paratope (antigen-binding (epitope-binding) structure) binding an epitope of CD3;
[0503] (d) a peptide linker having an amino acid sequence selected from the group consisting of SEQ ID NOs: 563-575 and SEQ ID NO: 679, particularly SEQ ID NO: 679;
[0504] (e) one polypeptide monomer of a half-life extending domain (comprising a hinge, a CH2 and a CH3 domain), having an amino acid sequence selected from the group consisting of SEQ ID NOs: 630-637, particularly SEQ ID NO: 630;
[0505] (f) a peptide linker having an amino acid sequence selected from the group consisting of SEQ ID NOs: 563-575, particularly SEQ ID NO: 573; and
[0506] (g) another polypeptide monomer of the half-life extending domain (comprising a hinge, a CH2 and a CH3 domain), having an amino acid sequence selected from the group consisting of SEQ ID NOs: 630-637, particularly SEQ ID NO: 630.

[0507] It is also envisaged that the polypeptide construct of the invention comprises in an N- to C-terminal order:
[0508] one domain comprising a paratope (antigen-binding (epitope-binding) structure) binding an epitope of CLDN6 having an amino acid sequence selected from the group consisting of SEQ ID NO: 19, SEQ ID NO: 22, SEQ ID NO: 33, SEQ ID NO: 36, SEQ ID NO: 47, SEQ ID NO: 50, SEQ ID NO: 75, SEQ ID NO: 78, SEQ ID NO: 201, SEQ ID NO: 204, particularly SEQ ID NO: 19, SEQ ID NO: 22, SEQ ID NO: 33, SEQ ID NO: 36, SEQ ID NO: 47, more particularly SEQ ID NO: 19, SEQ ID NO: 22; wherein the peptide linker comprised within those sequences and having SEQ ID NO: 570 can be replaced by any one of SEQ ID NOs: 563-575;
[0509] a peptide linker having an amino acid sequence selected from the group consisting of SEQ ID NOs: 563, 565, 566, 569, 570, particularly SEQ ID NO: 565;
[0510] another domain comprising a paratope (antigen-binding (epitope-binding) structure) binding an epitope of CD3 having an amino acid sequence selected from the group consisting of SEQ ID NOs: 542-562 and 678; wherein a peptide linker comprised within those sequences is selected from amino acids having SEQ ID NO: 563-575 and 679;
[0511] a peptide linker having an amino acid sequence selected from the group consisting of SEQ ID NOs: 563-575; and
[0512] an additional domain comprising one or more amino acid sequences selected from the group consisting of SEQ ID NOs: 630-637, particularly SEQ ID NO: 630, and a peptide linker having an amino acid sequence selected from the group consisting of SEQ ID NOs: 563-575, particularly SEQ ID NO: 573.

[0513] Hence, in one embodiment, the polypeptide construct of the present invention comprises or consists of a polypeptide having an amino acid sequence selected from the group of those SEQ ID NO: 21, 24, 35, 38, 49, 52, 63, 66, 77, 80, 91, 94, 105, 108, 119, 122, 133, 136, 147, 150, 161, 164, 175, 178, 189, 192, 203, 206, 217, 220, 231, 234, 245, 148, 259, 262, 273, 276, 287, 290, 301, 304, 315, 318, 329, 332, 343, 346, 357, 360, 371, 374, 385, 388, 399, 402, 413, 416, 427, and 430, particularly, 21, 24, 35, 38, 49, 52, 63, 66, 77, 80, 91, 94, more particularly, 21, 24, 35, 38, 49, 52, 77, and 80, and particularly, 21, 35, 49, and 77.

[0514] Covalent modifications of the polypeptides/polypeptide constructs are also included within the scope of this invention, and are generally, but not always, done post-translationally. For example, several types of covalent modifications of the construct are introduced into the molecule by reacting specific amino acid residues of the construct with an organic derivatizing agent that can react with selected side chains or with the N- or C-terminal residues. Derivatization with bifunctional agents is useful for crosslinking the constructs of the present invention to a water-insoluble support matrix or surface for use in a variety of methods. Glutaminyl and asparaginyl residues are frequently deamidated to the corresponding glutamyl and aspartyl residues, respectively. Alternatively, these residues are deamidated under mildly acidic conditions. Either form of these residues falls within the scope of this invention. Other modifications include hydroxylation of proline and lysine, phosphorylation of hydroxyl groups of seryl or threonyl residues, methylation of the α-amino groups of lysine, arginine, and histidine side chains (T. E. Creighton, Proteins: Structure and Molecular Properties, W. H. Freeman & Co., San Francisco, 1983, pp. 79-86), acetylation of the N-terminal amine, and amidation of any C-terminal carboxyl group.

[0515] Another type of covalent modification of the constructs included within the scope of this invention comprises altering the glycosylation pattern of the protein. As is known in the art, glycosylation patterns can depend on both the sequence of the protein (e.g., the presence or absence of specific glycosylation amino acid residues, discussed below), or the host cell or organism in which the protein is produced. Specific expression systems are discussed below. Glycosylation of polypeptides is typically either N-linked or O-linked. N-linked refers to the attachment of the carbohydrate moiety to the side chain of an asparagine residue. The tri-peptide sequences asparagine-X-serine and asparagine-X-threonine, where X is any amino acid except proline, are the recognition sequences for enzymatic attachment of the carbohydrate moiety to the asparagine side chain. Thus, the presence of either of these tri-peptide sequences in a polypeptide creates a potential glycosylation site. O-linked glycosylation refers to the attachment of one of the sugars N-acetylgalactosamine, galactose, or xylose, to a hydroxyamino acid, most commonly serine or threonine, although 5-hydroxyproline or 5-hydroxylysine may also be used.

[0516] Addition of glycosylation sites to the construct is conveniently accomplished by altering the amino acid sequence such that it contains one or more of the above-described tri-peptide sequences (for N-linked glycosylation sites). The alteration may also be made by the addition of, or substitution by, one or more serine or threonine residues to the starting sequence (for O-linked glycosylation sites). For ease, the amino acid sequence of a construct may be altered through changes at the DNA level, particularly by mutating the DNA encoding the polypeptide at preselected bases such that codons are generated that will translate into the desired amino acids.

[0517] Another means of increasing the number of carbohydrate moieties on the construct is by chemical or enzymatic coupling of glycosides to the protein. These procedures are advantageous in that they do not require production of the protein in a host cell that has glycosylation capabilities for N- and O-linked glycosylation. Depending on the coupling mode used, the sugar(s) may be attached to (a) arginine and histidine, (b) free carboxyl groups, (c) free sulfhydryl groups such as those of cysteine, (d) free hydroxyl groups such as those of serine, threonine, or hydroxyproline, (e) aromatic residues such as those of phenylalanine, tyrosine, or tryptophan, or (f) the amide group of glutamine. These methods are described in WO 87/05330, and in Aplin and Wriston, 1981, CRC Crit. Rev. Biochem., pp. 259-306.

[0518] Removal of carbohydrate moieties present on the starting construct may be accomplished chemically or enzymatically. Chemical deglycosylation requires exposure of the protein to the compound trifluoromethanesulfonic acid, or an equivalent compound. This treatment results in the cleavage of most or all sugars except the linking sugar (N-acetylglucosamine or N-acetylgalactosamine), while leaving the polypeptide intact. Chemical deglycosylation is described by Hakimuddin et al., 1987, Arch. Biochem. Biophys. 259:52 and by Edge et al., 1981, Anal. Biochem. 118:131. Enzymatic cleavage of carbohydrate moieties on polypeptides can be achieved using a variety of endo- and exo-glycosidases as described by Thotakura et al., 1987, Meth. Enzymol. 138:350. Glycosylation at potential glycosylation sites may be prevented using the compound tunicamycin as described by Duskin et al., 1982, J. Biol. Chem. 257:3105. Tunicamycin blocks the formation of protein-N-glycoside linkages.

[0519] Other modifications of the construct are also contemplated herein. For example, another type of covalent modification of the construct comprises linking the construct to various non-proteinaceous polymers, including polyols, in the manner set forth in U.S. Pat. Nos. 4,640,835; 4,496,689; 4,301,144; 4,670,417; 4,791,192 or 4,179,337. In addition, as is known in the art, amino acid substitutions may be made in various positions within the construct, e.g. to facilitate the addition of polymers such as polyethylene glycol (PEG).

[0520] In some embodiments, the covalent modification of the constructs of the invention comprises the addition of one or more labels. The labelling group may be coupled to the construct via spacer arms of various lengths to reduce potential steric hindrance. Various methods for labelling proteins are known in the art and can be used in performing the present invention. The term “label” or “labelling group” refers to any detectable label. In general, labels fall into a variety of classes, depending on the assay in which they are to be detected—the following examples include, but are not limited to: a) isotopic labels, which may be radioactive or heavy isotopes, such as radioisotopes or radionuclides (e.g., ³H, ¹⁴C, ¹⁵N, 35S, ⁸⁹Zr, ⁹⁰Y, ⁹⁹Tc, ¹¹¹In, ¹²⁵I, ¹³¹I)
[0521] b) magnetic labels (e.g., magnetic particles)
[0522] c) redox active moieties
[0523] d) optical dyes (including, but not limited to, chromophores, phosphors and fluorophores) such as fluorescent groups (e.g., FITC, rhodamine, lanthanide phosphors), chemiluminescent groups, and fluorophores which can be either “small molecule” fluores or proteinaceous fluores
[0524] e) enzymatic groups (e.g. horseradish peroxidase, β-galactosidase, luciferase, alkaline phosphatase)
[0525] f) biotinylated groups
[0526] g) predetermined polypeptide epitopes recognized by a secondary reporter (e.g., leucine zipper pair sequences, binding sites for secondary antibodies, metal binding domains, epitope tags, etc.).

[0527] By “fluorescent label” is meant any molecule that may be detected via its inherent fluorescent properties. Suitable fluorescent labels include, but are not limited to, fluorescein, rhodamine, tetramethylrhodamine, eosin, erythrosin, coumarin, methyl-coumarins, pyrene, Malacite green, stilbene, Lucifer Yellow, Cascade BlueJ, Texas Red, IAEDANS, EDANS, BODIPY FL, LC Red 640, Cy 5, Cy 5.5, LC Red 705, Oregon green, the Alexa-Fluor dyes (Alexa Fluor 350, Alexa Fluor 430, Alexa Fluor 488, Alexa Fluor 546, Alexa Fluor 568, Alexa Fluor 594, Alexa Fluor 633, Alexa Fluor 660, Alexa Fluor 680), Cascade Blue, Cascade Yellow and R-phycoerythrin (PE) (Molecular Probes, Eugene, OR), FITC, Rhodamine, and Texas Red (Pierce, Rockford, IL), Cy5, Cy5.5, Cy7 (Amersham Life Science, Pittsburgh, PA). Suitable optical dyes, including fluorophores, are described in Molecular Probes Handbook by Richard P. Haugland.

[0528] Suitable proteinaceous fluorescent labels also include, but are not limited to, green fluorescent protein, including a Renilla, Ptilosarcus, or Aequorea species of GFP (Chalfie et al., 1994, Science 263:802-805), EGFP (Clontech Laboratories, Inc., Genbank® Accession Number U55762), blue fluorescent protein (BFP, Quantum Biotechnologies, Inc. 1801 de Maisonneuve Blvd. West, 8th Floor, Montreal, Quebec, Canada H3H 1J9; Stauber, 1998, Biotechniques 24:462-471; Heim et al., 1996, Curr. Biol. 6:178-182), enhanced yellow fluorescent protein (EYFP, Clontech Laboratories, Inc.), luciferase (Ichiki et al., 1993, J. Immunol. 150:5408-5417), β galactosidase (Nolan et al., 1988, Proc. Natl. Acad. Sci. U.S.A. 85:2603-2607) and Renilla (WO92/15673, WO95/07463, WO98/14605, WO98/26277, WO99/49019, U.S. Pat. Nos. 5,292,658; 5,418,155; 5,683,888; 5,741,668; 5,777,079; 5,804,387; 5,874,304; 5,876,995; 5,925,558).

[0529] Leucine zipper domains are peptides that promote oligomerization of the proteins in which they are found. Leucine zippers were originally identified in several DNA-binding proteins (Landschulz et al., 1988, Science 240:1759), and have since been found in a variety of different proteins. Among the known leucine zippers are naturally occurring peptides and derivatives thereof that dimerize or trimerize. Examples of leucine zipper domains suitable for producing soluble oligomeric proteins are described in PCT application WO 94/10308, and the leucine zipper derived from lung surfactant protein D (SPD) described in Hoppe et al., 1994, FEBS Letters 344:191. The use of a modified leucine zipper that allows for stable trimerization of a heterologous protein fused thereto is described in Fanslow et al., 1994, Semin. Immunol. 6:267-78.

[0530] The polypeptide construct of the invention may also comprise additional domains, which are e.g. helpful in the isolation of the molecule or relate to an adapted pharmacokinetic profile of the molecule. Domains helpful for the isolation of a construct may be selected from peptide motives or secondarily introduced moieties, which can be captured in an isolation method, e.g. an isolation column. Non-limiting embodiments of such additional domains comprise peptide motives known as Myc-tag, HAT-tag, HA-tag, TAP-tag, GST-tag, chitin binding domain (CBD-tag), maltose binding protein (MBP-tag), Flag-tag, Strep-tag and variants thereof (e.g. StrepII-tag) and His-tag. All herein disclosed constructs characterized by the identified CDRs may comprise a His-tag domain, which is generally known as a repeat of consecutive His residues in the amino acid sequence of a molecule, e.g. of five His residues (SEQ ID NO: 638), or of six His residues (hexa-histidine, SEQ ID NO: 639). The His-tag may be located e.g. at the N- or C-terminus of the construct. In one embodiment, a hexa-histidine tag (HHHHHH) is linked via peptide bond to the C-terminus of the construct according to the invention.

[0531] It is also envisaged that the polypeptide construct of the present invention comprises or consists of a polypeptide which has an amino acid sequence selected from the group consisting of those depicted in SEQ ID NOs: 22 and 24, and which is linked at its N-terminus or at its C-terminus with a protein purification tag, preferably via a peptide bond (amide bond). The linking of the protein purification tag at the C-terminus of the polypeptide is preferred. It is envisaged that the protein purification tag is a short peptide. For example, the length of the short peptide may be 2-30 amino acids, 4-25 amino acids, 5-20 amino acids or 6-19 amino acids. Examples of protein purification tags include, but are not limited to, AU1 epitope (e.g. as depicted in SEQ ID NO: 644), AU5 epitope (e.g. as depicted in SEQ ID NO: 645), T7-tag (e.g. as depicted in SEQ ID NO: 646), V5-tag (e.g. as depicted in SEQ ID NO: 647), B-tag (e.g. as depicted in SEQ ID NO: 648), E2 epitope (e.g. as depicted in SEQ ID NO: 649), FLAG epitope/FLAG tag (e.g. as depicted in SEQ ID NO: 650), Glu-Glu tag (e.g. as depicted in SEQ ID NOs: 651 or 652), HA tag, Histidine affinity tag (e.g. as depicted in SEQ ID NO: 653), HSV epitope (e.g. as depicted in SEQ ID NO: 654), KT3 epitope (e.g. as depicted in SEQ ID NO: 655), Myc epitope (e.g. as depicted in SEQ ID NO: 656), polyarginine tag (5-6 Arg residues), polyaspartate tag (5-16 Asp residues), polyhistidine tag (2-10 His residues, usually 6 His residues, see e.g. SEQ ID NO: 639), polyphenylalanine tag (usually 11 Phe residues), S1 tag (e.g. as depicted in SEQ ID NO: 659), S-tag (e.g. as depicted in SEQ ID NO: 660), Strep-tag (e.g. as depicted in SEQ ID NOs: 661 or 662), universal tag (e.g. as depicted in SEQ ID NO: 663), VSV-G (e.g. as depicted in SEQ ID NO: 664), Protein C (e.g. as depicted in SEQ ID NO: 665), and Protein A. A histidine tag is preferred, especially a 6×His tag (SEQ ID NO: 639). Is it hence further envisaged that the construct of the present invention consists of a polypeptide which has an amino acid sequence selected from the group consisting of those depicted in SEQ ID NOs: 22 and 24, and which is linked at its C-terminus with a 6×His tag via a peptide bond.

[0532] T cells or T lymphocytes are a type of lymphocyte (itself a type of white blood cell) that play a central role in cell-mediated immunity. There are several subsets of T cells, each with a distinct function. T cells can be distinguished from other lymphocytes, such as B cells and NK cells, by the presence of a T cell receptor (TCR) on the cell surface. The TCR is responsible for recognizing antigens bound to major histocompatibility complex (MHC) molecules and is composed of two different protein chains. In 95% of the T cells, the TCR consists of an alpha (α) and beta (β) chain. When the TCR engages with antigenic peptide and MHC (peptide/MHC complex), the T lymphocyte is activated through a series of biochemical events mediated by associated enzymes, co-receptors, specialized adaptor molecules, and activated or released transcription factors.

[0533] The polypeptide construct of the invention comprises a domain which binds to CD3 on the surface of a T cell. “CD3” (cluster of differentiation 3) is a T cell co-receptor composed of four chains. In mammals, the CD3 protein complex contains a CD3γ (gamma) chain, a CD3δ (delta) chain, and two CD3ε (epsilon) chains. These four chains associate with the T cell receptor (TCR) and the so-called ζ (zeta) chain to for the “T cell receptor complex” and to generate an activation signal in T lymphocytes. The CD3γ (gamma), CD3δ (delta), and CD3ε (epsilon) chains are highly related cell-surface proteins of the immunoglobulin superfamily and each contain a single extracellular immunoglobulin domain. The intracellular tails of the CD3 molecules contain a single conserved motif known as an immunoreceptor tyrosine-based activation motif (ITAM), which is essential for the signaling capacity of the TCR. The CD3 epsilon molecule is a polypeptide which in humans is encoded by the CD3 epsilon gene which resides on chromosome 11. In the context of the present invention, CD3 is understood as a protein complex and T cell co-receptor that is involved in activating both the cytotoxic T cell (CD8+ naive T cells) and T helper cells (CD4+ naive T cells). It is typically composed of four distinct chains. Especially in mammals, the complex contains a CD3γ chain, a CD36 chain, and two CD3ε chains. These chains associate with the T-cell receptor (TCR) and the ζ-chain (zeta-chain) to generate an activation signal in T lymphocytes. The TCR, ζ-chain, and CD3 molecules together constitute the TCR complex.

[0534] The redirected lysis of target cells via the recruitment of T cells by a construct which binds to CD3 on the T cell and to a target protein on the target cell generally involves cytolytic synapse formation and delivery of perforin and granzymes. The engaged T cells are capable of serial target cell lysis and are not affected by immune escape mechanisms interfering with peptide antigen processing and presentation, or clonal T cell differentiation; see e.g. WO 2007/042261.

[0535] Cytotoxicity mediated by CLDN6×CD3 constructs can be measured in various ways. The “half maximal effective concentration” (EC50) is commonly used as a measure of potency of a biologically active molecule such as a construct of the present invention. It may be expressed in molar units. In the present case of measuring cytotoxicity, the EC50 value refers to the concentration of a construct inducing a cytotoxic response (lysis of target cells) halfway between the baseline and the maximum. Effector cells in a cytotoxicity assay can e.g. be stimulated enriched (human) CD8 positive T cells or unstimulated (human) peripheral blood mononuclear cells (PBMC). An EC50 value may typically be expected to be lower when stimulated/enriched CD8+ T cells are used as effector cells, compared with unstimulated PBMC. If the target cells are of macaque origin or express or are transfected with macaque CLDN6, the effector cells should also be of macaque origin, such as a macaque T cell line, e.g. 4119LnPx. The target cells should express CLDN6, such as human or macaque CLDN6, on the cell surface. Preferably the target cells should express at least the extracellular loop(s) of CLDN6, such as CLDN6 loop 1 and/or loop 2, on the cell surface. Target cells can be a cell line (such as CHO) which is stably or transiently transfected with CLDN6, e.g. human or macaque CLDN6. Alternatively, the target cells can be a CLDN6 positive natural expresser cell line, such as the human cancer lines. Usually EC50 values are expected to be lower when using target cells that express higher levels of CLDN6 on the cell surface compared with target cells having a lower target expression rate.

[0536] The effector to target cell (E:T) ratio in a cytotoxicity assay is usually about 10:1, but can also vary. Cytotoxic activity of CLDN6×CD3 constructs can be measured in a 51-chromium release assay (e.g. with an incubation time of about 18 hours) or in a in a FACS-based cytotoxicity assay (e.g. with an incubation time of about 48 hours). Modifications of the incubation time (cytotoxic reaction) are also envisaged. Other methods of measuring cytotoxicity are well-known and comprise MTT or MTS assays, ATP-based assays including bioluminescent assays, the sulforhodamine B (SRB) assay, WST assay, clonogenic assay and the ECIS technology.

[0537] According to one embodiment, the cytotoxic activity mediated by CLDN6×CD3 constructs of the present invention is measured in a cell-based cytotoxicity assay. It may also be measured in a 51-chromium release assay. It is envisaged that the EC50 value of the constructs of the invention is ≤300 pM, ≤280 pM, ≤260 pM, ≤250 pM, ≤240 pM, ≤220 pM, 200 pM, ≤180 pM, ≤160 pM, 150 pM, ≤140 pM, ≤120 pM, ≤100 pM, ≤90 pM, ≤80 pM, ≤70 pM, ≤60 pM, ≤50 pM, ≤40 pM, 30 pM, ≤20 pM, ≤15 pM, ≤10 pM, or ≤5 pM.

[0538] The above given EC50 values can be measured in different assays and under different conditions. For example, when human PBMCs are used as effector cells and CLDN6 transfected cells such as CHO cells are used as target cells, it is envisaged that the EC50 value of the CLDN6×CD3 construct is ≤500 pM, 400 pM, 300 pM, 280 pM, 260 pM, ≤250 pM, 240 pM, 220 pM, ≤200 pM, 180 pM, 160 pM, ≤150 pM, 140 pM, ≤120 pM, 100 pM, 90 pM, ≤80 pM, ≤70 pM, 60 pM, ≤50 pM, 40 pM, ≤30 pM, ≤20 pM, ≤15 pM, 10 pM, or ≤5 pM. When human PBMCs are used as effector cells and when the target cells are a CLDN6 positive cell line such as, it is envisaged that the EC50 value of the CLDN6×CD3 construct is 300 pM, 280 pM, 260 pM, ≤250 pM, 240 pM, 220 pM, ≤200 pM, ≤180 pM, ≤160 pM, ≤150 pM, ≤140 pM, ≤120 pM, ≤100 pM, ≤90 pM, ≤80 pM, ≤70 pM, ≤60 pM, ≤50 pM, 40 pM, ≤30 pM, ≤20 pM, ≤15 pM, 10 pM, or ≤5 pM.

[0539] According to one embodiment, the CLDN6×CD3 polypeptides/polypeptide constructs of the present invention do not induce/mediate lysis or do not essentially induce/mediate lysis of cells that do not express CLDN6 on their surface (CLDN6 negative cells), such as CHO cells. The term “do not induce lysis”, “do not essentially induce lysis”, “do not mediate lysis” or “do not essentially mediate lysis” means that a construct of the present invention does not induce or mediate lysis of more than 30%, preferably not more than 20%, more preferably not more than 10%, particularly preferably not more than 9%, 8%, 7%, 6% or 5% of CLDN6 negative cells, whereby lysis of CLDN6 expressing target cells (such as cells transformed or transfected with CLDN6 or a natural expresser cell line such as the human cancer lines) is set to be 100%. This usually applies for concentrations of the construct of up to 500 nM. Cell lysis measurement is a routine technique. Moreover, the present specification teaches specific instructions how to measure cell lysis.

[0540] The difference in cytotoxic activity between the monomeric and the dimeric isoform of individual CLDN6×CD3 polypeptides/polypeptide constructs is referred to as “potency gap”. This potency gap can e.g. be calculated as ratio between EC50 values of the molecule's monomeric and dimeric form. In one method to determine this gap, an 18 hour 51-chromium release assay or a 48 h FACS-based cytotoxicity assay is carried out as described hereinbelow with purified construct monomer and dimer. Effector cells are stimulated enriched human CD8+ T cells or unstimulated human PBMC. Target cells are hu CLDN6 transfected CHO cells. Effector to target cell (E:T) ratio is 10:1. Potency gaps of the CLDN6×CD3 constructs of the present invention are preferably ≤5, more preferably ≤4, even more preferably ≤3, even more preferably ≤2 and most preferably ≤1.

[0541] The domains of the polypeptide construct of the invention is/are preferably cross-species specific for members of the mammalian order of primates, such as macaques. Cross-species specific CD3 binding domains are, for example, described in WO 2008/119567. According to one embodiment, the domain, in addition to binding to human CD3, will also bind to CD3 of primates including (but not limited to) new world primates (such as Callithrix jacchus, Saguinus Oedipus or Saimiri sciureus), old world primates (such as baboons and macaques), gibbons, orangutans and non-human homininae. It is envisaged that the domain which binds to human CD3 on the surface of a T cell also binds at least to macaque CD3. A preferred macaque is Macaca fascicularis. Macaca mulatta (Rhesus) is also envisaged. One construct of the invention comprises a domain which binds to human CLDN6 on the surface of a target cell and another domain which binds to human CD3 on the surface of a T cell and at least macaque CD3.

[0542] In one embodiment, the affinity gap of the constructs according to the invention for binding macaque CD3 versus human CD3 [KD ma CD3: KD hu CD3](as determined e.g. by BiaCore or by Scatchard analysis) is between 0.01 and 100, preferably between 0.1 and 10, more preferably between 0.2 and 5, more preferably between 0.3 and 4, even more preferably between 0.5 and 3 or between 0.5 and 2.5, and most preferably between 0.5 and 1.

[0543] One domain of the construct of the invention binds to CD3. More preferably, it binds to CD3 on the surface of a T cell. It is furthermore envisaged that said domain binds to human CD3, preferably to human CD3 on the surface of a T cell. It is also envisaged that said domain binds to CD3 epsilon. More preferably, it binds to human CD3 epsilon, e.g. to human CD3 epsilon on the surface of a T cell. A preferred amino acid sequence for the extracellular domain of human CD3 epsilon is depicted in SEQ ID NO: 442.

[0544] In one embodiment of the present invention, said domain of the construct binds to human CD3 epsilon (or human CD3 epsilon on the surface of a T cell) and to Callithrix jacchus or Saimiri sciureus CD3 epsilon. It is also envisaged that said domain binds to an extracellular epitope of CD3 epsilon, preferably to an extracellular epitope of human CD3 epsilon. It is also envisaged that said domain binds to an extracellular epitope of the human and the Macaca CD3 epsilon chain. One preferred epitope of CD3 epsilon is comprised within amino acid residues 1-27 of the human CD3 epsilon extracellular domain (see SEQ ID NO: 443). Even more particularly, the epitope comprises at least the amino acid sequence Gln-Asp-Gly-Asn-Glu. Callithrix jacchus is a new world primate belonging to the family of Callitrichidae, while Saimiri sciureus is a new world primate belonging to the family of Cebidae. Binders having such characteristics are described in detail in WO 2008/119567.

[0545] Antibodies or bispecific constructs directed against (human) CD3 or selectively and, preferably, specifically against CD3 epsilon are known in the art, and their CDRs, VH and VL sequences can serve as a basis for the binding domain of the polypeptide construct of the invention. For example, Kung et al. reported in 1979 the development of OKT3 (Ortho Kung T3), the first mAb recognizing CD3 (specifically, the epsilon chain of CD3) on human T cells. OKT3 (muromonab) was the first monoclonal antibody of murine origin to become available for therapy in humans. Newer anti-CD3 monoclonal antibodies include otelixizumab (TRX4), teplizumab (MGA031), foralumab and visilizumab, all targeting the epsilon chain of CD3. Bispecific constructs directed against a (cancer) target and CD3 are also being developed and (pre-)clinically tested, and their CD3 binding domain (CDRs, VH, VL) may serve as a basis for the second binding domain of the construct of the invention. Examples include, but are not limited to, Blinatumomab, Solitomab (MT110, AMG 110), Catumaxomab, Duvortuxizumab, Ertumaxomab, Mosunetuzumab, FBTA05 (Bi20, TPBs05), CEA-TCB (RG7802, R06958688), AFM11, and MGD006 (S80880). Other examples of CD3 binding domains are disclosed e.g. in U.S. Pat. No. 7,994,289 B2, U.S. Pat. No. 7,728,114 B2, U.S. Pat. No. 7,381,803 B1, U.S. Pat. No. 6,706,265 B1.

[0546] It is envisaged for the polypeptide construct used in accordance with the present invention that the domain which binds to CD3 on the surface of a T cell comprises a VL region comprising CDR-L1, CDR-L2 and CDR-L3, wherein the sequence of CDR-L1 is depicted in SEQ ID NO: 673, the sequence of CDR-L2 is depicted in SEQ ID NO: 674, and the sequence of CDR-L3 is depicted in SEQ ID NO: 675; or a VL region comprising CDR-L1, CDR-L2 and CDR-L3, CDR-L1 sequences as depicted in SEQ ID NO: 673, CDR-L2 as depicted in SEQ ID NO: 674, and CDR-L3 as depicted in SEQ ID NO: 675, wherein one or more of the CDRs have at least one amino acid residue modification.

[0547] It is also envisaged for the polypeptide construct used in accordance with the present invention that the domain which binds to CD3 on the surface of a T cell comprises a VH region comprising CDR-H1, CDR-H2 and CDR-H3 wherein the sequence of CDR-H1 as depicted in SEQ ID NO: 670, the sequence of CDR-H2 as depicted in SEQ ID NO:671, and the sequence of CDR-H3 as depicted in SEQ ID NO: 672; or a VH region comprising CDR-H1, CDR-H2 and CDR-H3 wherein the sequence of CDR-H1 as depicted in SEQ ID NO: 670, the sequence of CDR-H2 as depicted in SEQ ID NO:671, and the sequence of CDR-H3 as depicted in SEQ ID NO: 672, wherein one or more of the CDRs have at least one amino acid residue modification.

[0548] It is furthermore envisaged for the polypeptide construct used in accordance with the present invention that the domain which binds to CD3 comprises a VL region comprising CDR-L1, CDR-L2 and CDR-L3 and a VH region comprising CDR-H1, CDR-H2 and CDR-H3, wherein the sequence of the CDR-L1 is depicted in SEQ ID NO: 673, the sequence of the CDR-L2 is depicted in SEQ ID NO: 674, and the sequence of the CDR-L3 is depicted in SEQ ID NO: 675, wherein the sequence of the CDR-H1 as depicted in SEQ ID NO: 670, the sequence of the CDR-H2 as depicted in SEQ ID NO:671, and the sequence of the CDR-H3 as depicted in SEQ ID NO: 672; or a domain which binds to CD3 comprises a VL region comprising CDR-L1, CDR-L2 and CDR-L3 and a VH region comprising CDR-H1, CDR-H2 and CDR-H3, wherein the sequence of the CDR-L1 is depicted in SEQ ID NO: 673, the sequence of the CDR-L2 is depicted in SEQ ID NO: 674, and the sequence of the CDR-L3 is depicted in SEQ ID NO: 675, wherein the sequence of the CDR-H1 as depicted in SEQ ID NO: 670, the sequence of the CDR-H2 as depicted in SEQ ID NO:671, and the sequence of the CDR-H3 as depicted in SEQ ID NO: 672, wherein one or more of the CDRs have at least one amino acid residue modification.

[0549] It is envisaged for the polypeptide construct used in accordance with the present invention that the domain which binds to CD3 on the surface of a T cell comprises a VL region depicted in SEQ ID NO: 677, or wherein the VL region comprises at least one amino acid residue modification.

[0550] It is envisaged for the polypeptide construct used in accordance with the present invention that the domain which binds to CD3 on the surface of a T cell comprises a VH region depicted in SEQ ID NO: 676, or wherein the VH region comprises at least one amino acid residue modification.

[0551] More preferably, the polypeptide construct used in accordance with the present invention is characterized by the domain which binds to CD3 on the surface of a T cell comprising a VL region and a VH region selected from the group consisting of (a) a VL region as depicted in SEQ ID NO: 677 and a VH region as depicted in SEQ ID NO: 676; or wherein the VL region or the VH region comprises at least one amino acid residue modification.

[0552] A preferred embodiment of the above described polypeptide construct used in accordance with the present invention is characterized by the domain which binds to CD3 on the surface of a T cell comprising an amino acid sequence depicted in SEQ ID NO: 678, or wherein the domain which binds to CD3 on the surface of a T cell comprising an amino acid sequence depicted in SEQ ID NO: 678 comprises at least one amino acid residue modification.

[0553] It is envisaged for the polypeptide construct used in accordance with the present invention that the domain which binds to CD3 on the surface of a T cell comprises a VL region (e.g. the VL region depicted in SEQ ID NO: 540) or a VH region (e.g. the VL region depicted in SEQ ID NO: 522 or 533), or CDRs that are depicted in SEQ ID NO: 444 to 506, particularly CDRs depicted in SEQ ID NO: 480 to 482 and 504 to 506, or an scFv as depicted, for example, in SEQ ID NO: 551 or 562, or in any one SEQ ID NOs: 542-561.

[0554] Amino acid sequence modifications of the polypeptides/polypeptide constructs described herein are also contemplated. For example, it may be desirable to improve the binding affinity and/or other biological properties of the polypeptide construct. Amino acid sequence variants of the polypeptides/polypeptide constructs are prepared by peptide synthesis or by introducing appropriate nucleotide changes into the nucleic acid molecule encoding the polypeptides/polypeptide constructs. All below described amino acid sequence modifications should result in a polypeptide construct which retains the desired biological activity of the unmodified parental molecule (such as binding to CLDN6 and to CD3, inducing cytotoxicity against CLDN6 positive target cells).

[0555] The term “amino acid” or “amino acid residue” typically refers to an amino acid having its art recognized definition such as an amino acid selected from the group consisting of: alanine (Ala or A); arginine (Arg or R); asparagine (Asn or N); aspartic acid (Asp or D); cysteine (Cys or C); glutamine (GIn or Q); glutamic acid (GIu or E); glycine (GIy or G); histidine (His or H); isoleucine (Ile or I): leucine (Leu or L); lysine (Lys or K); methionine (Met or M); phenylalanine (Phe or F); proline (Pro or P); serine (Ser or S); threonine (Thr or T); tryptophan (Trp or W); tyrosine (Tyr or Y); and valine (Val or V), although modified, synthetic, or rare amino acids may be used as desired. There are basically four different classes of amino acids determined by different side chains: (1) non-polar and neutral (uncharged): Ala, Gly, Ile, Leu, Met, Phe, Pro, Val; (2) polar and neutral (uncharged): Asn, Cys (being only slightly polar), Gln, Ser, Thr, Trp (being only slightly polar), Tyr; (3) acidic and polar (negatively charged): Asp and Glu; (4) basic and polar (positively charged): Arg, His, Lys.

[0556] Hydrophobic amino acids can be divided according to whether they have aliphatic or aromatic side chains. Phe and Trp (being very hydrophobic), Tyr and His (being less hydrophobic) are classified as aromatic amino acids. Strictly speaking, aliphatic means that the side chain contains only hydrogen and carbon atoms. By this strict definition, the amino acids with aliphatic side chains are alanine, isoleucine, leucine (also norleucine), proline and valine. Alanine's side chain, being very short, means that it is not particularly hydrophobic, and proline has an unusual geometry that gives it special roles in proteins. It is often convenient to consider methionine in the same category as isoleucine, leucine and valine, although it also contains a sulphur atom. The unifying theme is that these amino acids contain largely non-reactive and flexible side chains. The amino acids alanine, cysteine, glycine, proline, serine and threonine are often grouped together because they are all small. Gly and Pro may influence chain orientation.

[0557] Amino acid modifications include, for example, deletions of residues from, insertions of residues into, and/or substitutions of residues within the amino acid sequences of the polypeptides/polypeptide constructs. Any combination of deletion, insertion, and/or substitution is made to arrive at a final construct, provided that the final construct possesses the desired characteristics, e.g. the biological activity of the unmodified parental molecule (such as binding to CLDN6 and to CD3, inducing cytotoxicity against CLDN6 positive target cells). The amino acid changes may also alter post-translational processes of the constructs, such as changing the number or position of glycosylation sites.

[0558] For example, 1, 2, 3, 4, 5, or 6 amino acids may be inserted, deleted and/or substituted in each of the CDRs (of course, dependent on their respective length), while 1, 2, 3, 4, 5, 6, 7, 8, 9, 10, 11, 12, 13, 14, 15, 16, 17, 18, 19, 20, or 25 amino acids may be inserted, deleted and/or substituted in each of the framework regions (FRs). Amino acid sequence insertions also include N-terminal and/or C-terminal additions of amino acids ranging in length from e.g. 1, 2, 3, 4, 5, 6, 7, 8, 9 or 10 residues to polypeptides containing more than 10, e.g. one hundred or more residues, as well as intra-sequence insertions of single or multiple amino acid residues. An insertional variant of the construct of the invention includes the fusion of a polypeptide which increases or extends the serum half-life of the construct to the N-terminus or to the C-terminus of the construct. It is also conceivable that such insertion occurs within the construct, e.g. between the first and the second domain.

[0559] The sites of greatest interest for amino acid modifications, particularly for amino acid substitutions, include the the hypervariable regions, particularly the individual CDRs of the heavy and/or light chain, but FR alterations in the heavy and/or light chain are also contemplated. The substitutions can be conservative substitutions as described herein. Preferably, 1, 2, 3, 4, 5, 6, 7, 8, 9, or 10 amino acids may be substituted in a CDR, while 1, 2, 3, 4, 5, 6, 7, 8, 9, 10, 11, 12, 13, 14, 15, 16, 17, 18, 19, 20, or 25 amino acids may be substituted in the framework regions (FRs), depending on the length of the CDR or FR, respectively. For example, if a CDR sequence encompasses 6 amino acids, it is envisaged that one, two or three of these amino acids are substituted. Similarly, if a CDR sequence encompasses 15 amino acids it is envisaged that one, two, three, four, five or six of these amino acids are substituted.

[0560] A useful method for the identification of certain residues or regions within the constructs that are preferred locations for mutagenesis is called “alanine scanning mutagenesis” and is described e.g. in Cunningham B. C. and Wells J. A. (Science. 1989 Jun. 2; 244(4908):1081-5). Here, a residue or group of residues within the construct is/are identified (e.g. charged residues such as Arg, His, Lys, Asp, and Glu) and replaced by a neutral or non-polar amino acid (most preferably alanine or polyalanine) to affect the interaction of the respective amino acid(s) with the epitope of the target protein. Alanine scanning is a technique used to determine the contribution of a specific residue to the stability or function of given protein. Alanine is used because of its non-bulky, chemically inert, methyl functional group that nevertheless mimics the secondary structure preferences that many of the other amino acids possess. Sometimes bulky amino acids such as valine or leucine can be used in cases where conservation of the size of mutated residues is needed. This technique can also be useful to determine whether the side chain of a specific residue plays a significant role in bioactivity. Alanine scanning is usually accomplished by site-directed mutagenesis or randomly by creating a PCR library. Furthermore, computational methods to estimate thermodynamic parameters based on theoretical alanine substitutions have been developed. The data can be tested by IR, NMR Spectroscopy, mathematical methods, bioassays, etc.

[0561] Those amino acid locations demonstrating functional sensitivity to the substitutions (as determined e.g. by alanine scanning) can then be refined by introducing further or other variants at, or for, the sites of substitution. Thus, while the site or region for introducing an amino acid sequence variation is predetermined, the nature of the mutation per se needs not to be predetermined. For example, to analyze or optimize the performance of a mutation at a given site, alanine scanning, or random mutagenesis may be conducted at a target codon or region, and the expressed construct variants are screened for the optimal combination of desired activity. Techniques for making substitution mutations at predetermined sites in the DNA having a known sequence are well known, for example, M13 primer mutagenesis and PCR mutagenesis. Screening of the mutants is done e.g. using assays of antigen (e.g. CLDN6 or CD3) binding activity and/or of cytotoxic activity.

[0562] Generally, if amino acids are substituted in one or more or all the CDRs of the heavy and/or light chain, it is envisaged that the then-obtained “substituted” sequence is at least 60% or 65%, more preferably 70% or 75%, even more preferably 80% or 85%, and particularly preferably 90% or 95% identical/homologous to the “original” or “parental” CDR sequence. This means that the degree of identity/homology between the original and the substituted sequence depends on the length of the CDR. For example, a CDR having 5 amino acids in total and comprising one amino acid substitution is 80% identical to the “original” or “parental” CDR sequence, while a CDR having 10 amino acids in total and comprising one amino acid substitution is 90% identical to the “original” or “parental” CDR sequence. Accordingly, the substituted CDRs of the construct of the invention may have different degrees of identity to their original sequences, e.g., CDRL1 may have 80%, while CDRL3 may have 90% of homology. The same considerations apply to the framework regions and to the entire VH and VL regions.

[0563] A “variant CDR” is a CDR with a specific sequence homology, similarity, or identity to the parent CDR of the invention, and shares biological function with the parent CDR, including, but not limited to, at least 60%, 65%, 70%, 75%, 80%, 81%, 82%, 83%, 84%, 85%, 86%, 87%, 88%, 89%, 90%, 91%, 92%, 93%, 94%, 95%, 96%, 97%, 98%, or 99% of the specificity and/or activity of the parent CDR. Generally, the amino acid homology, similarity, or identity between individual variant CDRs is at least 60% to the parent sequences depicted herein, and more typically with increasing homologies, similarities or identities of at least 65% or 70%, preferably at least 75% or 80%, more preferably at least 85%, 90%, 91%, 92%, 93%, 94%, and most preferably 95%, 96%, 97%, 98%, 99%, and almost 100%. The same applies to “variant VH” and “variant VL”. According to one embodiment, the sequence variations within a “variant VH” and/or a “variant VL” do not extend to the CDRs. The present invention is hence directed to a construct as defined herein, comprising VH and VL sequences having a certain sequence homology (see above) to the specific sequences as defined herein (the “parental” VH and VL), wherein the CDR sequences are 100% identical to the specific CDR sequences as defined herein (the “parental” CDRs).

[0564] Preferred substitutions (or replacements) are conservative substitutions. However, any substitution (including non-conservative substitutions or one or more from the “exemplary substitutions” listed in Table 1, below) is envisaged, as long as the construct retains its capacity to bind to CLDN6 via the first domain and to CD3 or CD3 epsilon via the second domain, and/or provided its CDRs, FRs, VH and/or VL sequences have a degree of identity to the original or parental sequence of at least 60% or 65%, more preferably at least 70% or 75%, even more preferably at least 80% or 85%, and particularly preferably at least 90% or 95%.

[0565] A conservative replacement (also called a conservative mutation or a conservative substitution) is an amino acid replacement that changes a given amino acid to a different amino acid with similar biochemical properties (e.g. charge, hydrophobicity, size). Conservative replacements in proteins often have a smaller effect on protein function than non-conservative replacements. Conservative substitutions are shown in Table 1. Exemplary conservative substitutions are shown as “exemplary substitutions”. If such substitutions result in a change in biological activity, then more substantial changes, as further described herein with reference to amino acid classes, may be introduced and the products screened for a desired characteristic.

TABLE 1
Amino acid substitutions (aa = amino acid)

| Original aa | Conservative substitutions | Exemplary Substitutions |
|---|---|---|
| Ala (A) | Small aa | Gly, Ser, Thr |
| Arg (R) | Polar aa, particularly Lys | Lys, Gln, Asn |
| Asn (N) | Polar aa, particularly Asp | Asp, Gln, His, Lys, Arg |
| Asp (D) | Glu or other polar aa, particularly Asn | Glu, Asn |
| Cys (C) | Small aa | Ser, Ala |
| Gln (Q) | Polar aa, particularly Glu | Glu, Asn |
| Glu (E) | Asp or other polar aa, particularly Gln | Asp, Gln |
| Gly (G) | Small aa, such as Ala | Ala |
| His (H) | | Asn, Gln, Arg, Lys, Tyr |
| Ile (I) | Hydrophobic, particularly aliphatic aa | Ala, Val, Met, Leu, Phe |
| Leu (L) | Hydrophobic, particularly aliphatic aa | Norleucine, Ile, Ala, Val, Met |
| Lys (K) | Polar aa, particularly Arg | Arg, Gln, Asn |
| Met (M) | Hydrophobic, particularly aliphatic aa | Leu, Ala, Ile, Val, Phe |
| Phe (F) | Aromatic or hydrophobic aa, particularly | Tyr, Trp, Leu, Val, Ile, Ala |
| | Tyr | |
| Pro (P) | Small aa | Ala |
| Ser (S) | Polar or small aa, particularly Thr | Thr |
| Thr (T) | Polar aa, particularly Ser | Ser |
| Trp (W) | Aromatic aa | Tyr, Phe |
| Tyr (Y) | Aromatic aa, particularly Phe | Phe, Trp, Thr, Ser |
| Val (V) | Hydrophobic, particularly aliphatic aa | Leu, Ile, Ala, Met, Phe |

[0566] Substantial modifications in the biological properties of the construct of the present invention are accomplished by selecting substitutions that differ significantly in their effect on maintaining (a) the structure of the polypeptide backbone around the substitution, for example, as a sheet or helical conformation, (b) the charge or hydrophobicity of the molecule at the target site, or (c) the bulk of the side chain. Non-conservative substitutions will usually entail exchanging a member of one of the above defined amino acid classes (such as polar, neutral, acidic, basic, aliphatic, aromatic, small . . . ) for another class. Any cysteine residue not involved in maintaining the proper conformation of the construct may be substituted, generally with serine, to improve the oxidative stability of the construct.

[0567] Sequence identity, homology and/or similarity of amino acid sequences is determined by using standard techniques known in the art, including, but not limited to, the local sequence identity algorithm of Smith and Waterman, 1981, Adv. Appl. Math. 2:482, the sequence identity alignment algorithm of Needleman and Wunsch (J Mol Biol. 1970 March; 48(3):443-53), the search for similarity method of Pearson and Lipman (Proc Natl Acad Sci USA. 1988 April; 85(8):2444-8), computerized implementations of these algorithms (GAP, BESTFIT, FASTA, and TFASTA in the Wisconsin Genetics Software Package, Genetics Computer Group, 575 Science Drive, Madison, Wis.), the Best Fit sequence program described by Devereux et al. (Nucleic Acids Res. 1984 Jan. 11; 12(1 Pt 1):387-95), preferably using the default settings, or by inspection. It is envisaged that percent identity is calculated by FastDB based upon the following parameters: mismatch penalty of 1; gap penalty of 1; gap size penalty of 0.33; and joining penalty of 30. See also “Current Methods in Sequence Comparison and Analysis,” Macromolecule Sequencing and Synthesis, Selected Methods and Applications, pp 127-149 (1988), Alan R. Liss, Inc.

[0568] An example of a useful algorithm is PILEUP. PILEUP creates a multiple sequence alignment from a group of related sequences using progressive, pairwise alignments. It can also plot a tree showing the clustering relationships used to create the alignment. PILEUP uses a simplification of the progressive alignment method of Feng and Doolittle (J Mol Evol. 1987; 25(4):351-60); the method is similar to that described by Higgins and Sharp (Comput Appl Biosci. 1989 April; 5(2):151-3). Useful PILEUP parameters include a default gap weight of 3.00, a default gap length weight of 0.10, and weighted end gaps.

[0569] Another example of a useful algorithm is the BLAST algorithm, described in: Altschul et al. (J Mol Biol. 1990 Oct. 5; 215(3):403-10); Altschul et al., (Nucleic Acids Res. 1997 Sep. 1; 25(17):3389-402); and Karlin and Altschul (Proc Natl Acad Sci USA. 1993 Jun. 15; 90(12):5873-7). A particularly useful BLAST program is the WU-Blast-2 program which was obtained from Altschul et al., (Methods Enzymol. 1996; 266:460-80). WU-Blast-2 uses several search parameters, most of which are set to the default values. The adjustable parameters are set with the following values: overlap span=1, overlap fraction=0.125, word threshold (T)=II. The HSP S and HSP S2 parameters are dynamic values and are established by the program itself depending upon the composition of the specific sequence and composition of the respective database against which the sequence of interest is being searched; however, the values may be adjusted to increase sensitivity.

[0570] An additional useful algorithm is gapped BLAST as reported by Altschul et al. (Nucleic Acids Res. 1997 Sep. 1; 25(17):3389-402). Gapped BLAST uses BLOSUM-62 substitution scores; threshold T parameter set to 9; the two-hit method to trigger ungapped extensions, charges gap lengths of k a cost of 10+k; Xu set to 16, and Xg set to 40 for database search stage and to 67 for the output stage of the algorithms. Gapped alignments are triggered by a score corresponding to about 22 bits.

[0571] In line herewith, the term “percent (%) nucleic acid sequence identity/homology/similarity” with respect to the nucleic acid sequence encoding the constructs identified herein is defined as the percentage of nucleotide residues in a candidate sequence that are identical with the nucleotide residues in the coding sequence of the construct. One method to align two sequences and thereby determine their homology uses the BLASTN module of WU-Blast2 set to the default parameters, with overlap span and overlap fraction set to 1 and 0.125, respectively. Generally, the nucleic acid sequence homology, similarity, or identity between the nucleotide sequences encoding individual variant CDRs and the nucleotide sequences depicted herein are at least 60%, and more typically with increasing homologies, similarities or identities of at least 65%, 70%, 75%, 80%, 81%, 82%, 83%, 84%, 85%, 86%, 87%, 88%, 89%, 90%, 91%, 92%, 93%, 94%, 95%, 96%, 97%, 98%, or 99%, and almost 100%. Again, the same applies to nucleic acid sequence encoding the “variant VH” and/or “variant VL”.

[0572] In one embodiment, the percentage of identity to human germline of the polypeptides/polypeptide constructs according to the invention, or of the domains comprising paratopes (antigen-binding (epitope-binding) structures; (binding domains)) of these constructs, is ≥70% or ≥75%, more preferably ≥80% or ≥85%, even more preferably ≥90%, and most preferably ≥91%, ≥92%, ≥93%, ≥94%, ≥95% or even ≥96%. Identity to human antibody germline gene products is thought to be an important feature to reduce the risk of therapeutic proteins to elicit an immune response against the drug in the patient during treatment. Hwang W. Y. and Foote J. (Methods. 2005 May; 36(1):3-10) demonstrate that the reduction of non-human portions of drug constructs leads to a decrease of risk of inducing anti-drug antibodies in the patients during treatment. By comparing an exhaustive number of clinically evaluated antibody drugs and the respective immunogenicity data, the trend is shown that humanization of the variable regions of antibodies/constructs makes the protein less immunogenic (average 5.1% of patients) than antibodies/constructs carrying unaltered non-human variable regions (average 23.59% of patients). Higher degrees of identity to human sequences are hence desirable for protein therapeutics based on variable regions and in the form of polypeptides/polypeptide constructs. To determine the germline identity, the V-regions of VL can be aligned with the amino acid sequences of human germline V segments and J segments (http://www2.mrc-lmb.cam.ac.uk/vbase/) using Vector NTI software and the amino acid sequence calculated by dividing the identical amino acid residues by the total number of amino acid residues of the VL in percent. The same can be done for the VH segments (http://www2.mrc-lmb.cam.ac.uk/vbase/) with the exception that the VH CDR3 may be excluded due to its high diversity and a lack of existing human germline VH CDR3 alignment partners. Recombinant techniques can then be used to increase sequence identity to human antibody germline genes.

[0573] In a further embodiment, the polypeptides/polypeptide constructs of the present invention exhibit high monomer yields under standard research scale conditions, e.g., in a standard two-step purification process. It is envisaged that the monomer yield of the constructs according to the invention is ≥0.25 mg/L supernatant (SN), preferably ≥0.5 mg/L SN, more preferably ≥1 mg/L SN, even more preferably ≥2 mg/L SN and most preferably ≥3 mg/L SN. The yield of the construct denominated “CL-1×12C-6His” was shown to be 4.1 mg/L supernatant, and the yield of the construct denominated “CL-1×12C-scFc” was shown to be 36.5 mg/L supernatant.

[0574] Likewise, the yield of the dimeric polypeptide construct isoforms and hence the monomer percentage (i.e., monomer: (monomer+dimer)) of the constructs can be determined. The productivity of monomeric and dimeric constructs and the calculated monomer percentage can e.g. be obtained in the SEC purification step of culture supernatant from standardized research-scale production in roller bottles. According to one embodiment, the monomer percentage of the constructs of the invention is ≥80%, more preferably ≥85%, even more preferably ≥90%, and most preferably ≥95%.

[0575] According to one embodiment, the polypeptides/polypeptide constructs of the invention have a plasma stability (ratio of EC50 with plasma to EC50 w/o plasma) of ≤5 or ≤4, more preferably ≤3.5 or ≤3, even more preferably ≤2.5 or ≤2, and most preferably ≤1.5 or ≤1. The plasma stability of a construct can be tested by incubation of the purified construct in human plasma at 37° C. for 24 to 96 hours, e.g. at a concentration of 2-20 μg/ml, followed by EC50 determination in an 18 h 51-chromium release or in a 48 h FACS cytotoxicity assay (assays e.g. as described in the Examples section). The effector cells in the cytotoxicity assay can be stimulated enriched human CD8 positive T cells (preferred) or unstimulated human PBMC. Target cells can e.g. be CHO cells transfected with human CLDN6. The effector to target cell (E:T) ratio can be 10:1. The starting concentration of the constructs in the cytotoxicity assay can be 0.01-0.1 μg/ml. The human plasma pool used for this purpose is derived from the blood of healthy donors collected by EDTA coated syringes. Cellular components are removed by centrifugation and the upper plasma phase is collected and subsequently pooled. As control, non-incubated constructs are diluted immediately prior to the cytotoxicity assay in appropriate medium such as RPMI-1640. The plasma stability is calculated as ratio of EC50 (after plasma incubation) to EC50 (control/no incubation).

[0576] It is furthermore envisaged that the monomer to dimer conversion of the constructs of the invention is low. The conversion can be measured under different conditions and analyzed by high performance size exclusion chromatography. See Example 8. For example, incubation of the monomeric isoforms of the constructs can be carried out for 7 days at 37° C. in generic formulation buffer and at concentrations of e.g. 100 μg/ml or 250 μg/ml in an incubator, followed by high performance SEC to determine the percentage of initially monomeric construct which had been converted into dimeric construct. Under these conditions, it is envisaged that the polypeptides/polypeptide constructs of the invention show a dimer percentage that is ≤8%, preferably ≤6%, more preferably ≤5%, more preferably ≤4%, even more preferably ≤3%, even more preferably ≤2.5%, even more preferably ≤2%, even more preferably ≤1.5%, and most preferably ≤1% or ≤0.5% or even 0%.

[0577] It is likewise envisaged that the polypeptides/polypeptide constructs of the present invention present with very low dimer conversion after several freeze/thaw cycles. For example, the construct monomer is adjusted to a concentration of 250 μg/ml e.g. in generic formulation buffer and subjected to three freeze/thaw cycles (freezing at −80° C. for 30 min followed by thawing for 30 min at room temperature), followed by high performance SEC to determine the percentage of initially monomeric construct which had been converted into dimeric construct. It is envisaged that the dimer percentages of the constructs are 8%, preferably 6%, more preferably ≤5%, more preferably ≤4%, even more preferably ≤3%, even more preferably 2.5%, even more preferably 2%, even more preferably 1.5%, and most preferably 1% or 0.5% or even 0%, for example after three freeze/thaw cycles.

[0578] According to one embodiment, the polypeptides/polypeptide constructs of the present invention show a favorable thermostability with aggregation temperatures ≥45° C. or ≥46° C., more preferably ≥47° C. or ≥48° C., even more preferably ≥49° C. or ≥50° C., and most preferably ≥51° C. The thermostability parameter can be determined in terms of antibody aggregation temperature as follows: Antibody solution at a concentration 250 μg/ml is transferred into a single use cuvette and placed in a dynamic light scattering (DLS) device. The sample is heated from 40° C. to 70° C. at a heating rate of 0.5° C./min with constant acquisition of the measured radius. Increase of radius indicating melting of the protein and aggregation is used to calculate the aggregation temperature of the antibody.

[0579] Alternatively, temperature melting curves can be determined by differential scanning calorimetry (DSC) to determine intrinsic biophysical protein stabilities of the constructs. These experiments can be performed using a MicroCal LLC VP-DSC device. The energy uptake of a sample containing a construct is recorded from 20° C. to 90° C. compared to a sample containing only the formulation buffer. The constructs are adjusted to a final concentration of 250 μg/ml e.g. in SEC running buffer. For recording of the respective melting curve, the overall sample temperature is increased stepwise. Energy uptake of the sample and the formulation buffer reference is recorded at each temperature. The difference in energy uptake Cp (kcal/mole/° C.) of the sample minus the reference is plotted against the respective temperature. The melting temperature is defined as the temperature at the first maximum of energy uptake.

[0580] The polypeptides/polypeptide constructs of the invention are also envisaged to have a turbidity of ≤0.2 or ≤0.15, preferably of ≤0.10 or ≤0.08, more preferably of ≤0.06 or ≤0.05, and most preferably of ≤0.04 or ≤0.03. The turbidity can be measured by OD340 at a concentration of the construct of 2.5 mg/ml and 16 h incubation at 5° C.

[0581] Changes in the potency of a target×CD3 construct as a function of preincubation of the construct on the target cells in the absence of T cells can be measured. If a construct is internalized, it is expected to undergo lysosomal degradation. The effective concentration is hence expected to decrease over time, and thus the apparent potency should decrease as well. The effect has been observed with some targets, for which this is a known phenomenon. Constructs of the invention are envisaged to not be internalized or to not undergo significant internalization by the target cell. The rate of internalization can be assayed e.g. as described in the following: T cells are counted and diluted to a concentration of 1×105/ml in assay media. Target positive target cells are counted and plated e.g. at 2500 cells per well (cpw). The construct is diluted serially 1:2, e.g. at a starting concentration of 100 nM. The construct is added to the culture assay plates to allow for 0 hours, 1 hour or 2 hours of incubation prior to addition of the T cells. Then the T cells are plated at 25000 cpw (E:T=10:1), and the assay is incubated for 48 hours at 37° C. Target cell survival is analyzed e.g. with the Steady-Glo® system (25 μl/well). Preferably, the internalization rate (e.g. measured as a decrease in cytotoxicity) is ≤20% after a 2-hour (pre-)incubation of the construct with the target cell, more preferably ≤15%, even more preferably ≤10%, and most preferably ≤5%.

[0582] It is furthermore envisaged for a polypeptide construct of the invention that shed or soluble target does not significantly impair its efficacy or biologic activity. This can be measured, e.g. in a cytotoxicity assay where soluble target is added at increasing concentrations to the assay, e.g. at 0 nM-0.3 nM-0.7 nM-1 nM-3 nM-7 nM-12 nM. An exemplary E:T value is 10:1. The EC50 value of the tested construct should not be significantly increased in the presence of soluble target.

[0583] The EC50 values of the polypeptides/polypeptide constructs of the invention may be compared in in vitro cytotoxicity assays using CLDN6-expressing cells (e.g., CHO cells expressing the CLDN6, which are used as targets) and CLDN9-expressing cells (e.g., CHO cells expressing the CLDN9, which are used as targets), the latter serving as negative controls. The selectivity and specificity of the polypeptides/polypeptide constructs of the invention may be determined using T cells (e.g., PBMCs) as effector cells and the above CHO cells as targets. The cytotoxic effect of the polypeptides/polypeptide constructs of the invention may be determined. According to the invention, the polypeptides/polypeptide constructs described herein are at least 500 fold, at least 1000 fold, at least 2000 fold, and preferably at least 3000 fold more effective towards CLDN6-positive target cells than towards CLDN9-positive target cells, wherein the targets are preferably of the same cellular origin, e.g. CHO-cells, which are transfected or transformed with and expressing the genes encoding CLDN6 and CLDN9, respectively. Of course, it is possible to use other cell type expressing CLDN6, and a control cell that does not express CLDN6, but CLDN9 or CLDN4 or no CLDN-family member at all. These cells may be cell lines naturally expressing the molecules of interest or they may have been genetically modified to express CLDN6 and/or other CLDN-molecules, the latter being the controls. These cells may be used in methods of determining the T cell-dependent cytotoxicity associated with the present polypeptides/polypeptide constructs.

[0584] In a further embodiment, the polypeptide construct according to the invention is stable at acidic pH. The more tolerant the construct behaves at unphysiologic pH such as pH 5.5 (a pH which is required to run e.g. a cation exchange chromatography), the higher is the recovery of the construct eluted from an ion exchange column relative to the total amount of loaded protein. Recovery of the construct from an ion (e.g., cation) exchange column at pH 5.5 is preferably ≥30%, more preferably ≥40%, more preferably ≥50%, even more preferably ≥60%, even more preferably ≥70%, even more preferably ≥80%, and most preferably ≥95%. The percentage represents the area under the curve (=AUC) of the main peak.

[0585] It is furthermore envisaged that the polypeptides/polypeptide constructs of the present invention exhibit therapeutic efficacy, which manifests as anti-tumor activity or tumor growth inhibition. This can e.g. be assessed in a study as disclosed in Example 13 or 14. In one embodiment, the tumor growth inhibition of the construct of the invention T/C [%] is ≤70, ≤60, ≤50, ≤40, ≤30, ≤20, ≤10, ≤5, ≤4, ≤3, or ≤2. Modification or adjustment of certain parameters of these studies (such as the number of injected tumor cells, the site of injection, the number of transplanted human T cells, the number of constructs to be administered, and the timelines) is also envisaged, while still arriving at a meaningful and reproducible result.

[0586] The invention further provides a polynucleotide/nucleic acid molecule encoding a polypeptide construct of the invention. Nucleic acid molecules are biopolymers composed of nucleotides. A polynucleotide is a biopolymer composed of 13 or more nucleotide monomers covalently bonded in a chain. DNA (such as cDNA) and RNA (such as mRNA) are examples of polynucleotides/nucleic acid molecules with distinct biological function. Nucleotides are organic molecules that serve as the monomers or subunits of nucleic acid molecules like DNA or RNA. The nucleic acid molecule or polynucleotide of the present invention can be double stranded or single stranded, linear or circular. It is envisaged that the nucleic acid molecule or polynucleotide is comprised in a vector. It is furthermore envisaged that such vector is comprised in a host cell. Said host cell is, e.g. after transformation or transfection with the vector or the polynucleotide/nucleic acid molecule of the invention, capable of expressing the construct. For this purpose, the polynucleotide or nucleic acid molecule is operatively linked with control sequences.

[0587] The genetic code is the set of rules by which information encoded within genetic material (nucleic acids) is translated into proteins. Biological decoding in living cells is accomplished by the ribosome which links amino acids in an order specified by mRNA, using tRNA molecules to carry amino acids and to read the mRNA three nucleotides at a time. The code defines how sequences of these nucleotide triplets, called codons, specify which amino acid will be added next during protein synthesis. With some exceptions, a three-nucleotide codon in a nucleic acid sequence specifies a single amino acid. Because the vast majority of genes are encoded with exactly the same code, this particular code is often referred to as the canonical or standard genetic code.

[0588] Degeneracy of codons is the redundancy of the genetic code, exhibited as the multiplicity of three-base pair codon combinations that specify an amino acid. Degeneracy results because there are more codons than encodable amino acids. The codons encoding one amino acid may differ in any of their three positions; however, often this difference is in the second or third position. For instance, codons GAA and GAG both specify glutamic acid and exhibit redundancy; but, neither specifies any other amino acid nor thus demonstrate ambiguity. The genetic codes of different organisms can be biased towards using one of the several codons that encode the same amino acid over the others—that is, a greater frequency of one will be found than expected by chance. For example, leucine is specified by six distinct codons, some of which are rarely used. Codon usage tables detailing genomic codon usage frequencies for most organisms are available. Recombinant gene technologies commonly take advantage of this effect by implementing a technique termed codon optimization, in which those codons are used to design a polynucleotide which are preferred by the respective host cell (such as a cell of human hamster origin, an Escherichia coli cell, or a Saccharomyces cerevisiae cell), e.g. to increase protein expression. It is hence envisaged that the polynucleotides/nucleic acid molecules of the present disclosure are codon optimized. Nevertheless, the polynucleotide/nucleic acid molecule encoding a construct of the invention may be designed using any codon that encodes the desired amino acid.

[0589] According to one embodiment, the polynucleotide/nucleic acid molecule of the present invention encoding the polypeptide construct of the invention is in the form of one single molecule or in the form of two or more separate molecules. If the construct of the present invention is a single chain construct, the polynucleotide/nucleic acid molecule encoding such construct will most likely also be in the form of one single molecule. However, it is also envisaged that different components of the polypeptide construct (such as the different domains, e.g. the paratope (antigen-binding (epitope-binding) structure)-comprising domain which binds to CLDN6, the paratope (antigen-binding (epitope-binding) structure)-comprising domain which binds to CD3, and/or further domains such as antibody constant domains) are located on separate polypeptide chains, in which case the polynucleotide/nucleic acid molecule is most likely in the form of two or more separate molecules.

[0590] The same applies for the vector comprising a polynucleotide/nucleic acid molecule of the present invention. If the construct of the present invention is a single chain construct, one vector may comprise the polynucleotide which encodes the construct in one single location (as one single open reading frame, ORF). One vector may also comprise two or more polynucleotides/nucleic acid molecules at separate locations (with individual ORFs), each one of them encoding a different component of the construct of the invention. It is envisaged that the vector comprising the polynucleotide/nucleic acid molecule of the present invention is in the form of one single vector or two or more separate vectors. In one embodiment, and for the purpose of expressing the construct in a host cell, the host cell of the invention should comprise the polynucleotide/nucleic acid molecule encoding the construct or the vector comprising such polynucleotide/nucleic acid molecule in their entirety, meaning that all components of the construct—whether encoded as one single molecule or in separate molecules/locations—will assemble after translation and form together the biologically active construct of the invention.

[0591] The invention also provides a vector comprising a polynucleotide/nucleic acid molecule of the invention. A vector is a nucleic acid molecule used as a vehicle to transfer (foreign) genetic material into a cell, usually to ensure the replication and/or expression of the genetic material. The term “vector” encompasses—but is not restricted to—plasmids, viruses, cosmids, and artificial chromosomes. Some vectors are designed specifically for cloning (cloning vectors), others for protein expression (expression vectors). So-called transcription vectors are mainly used to amplify their insert. The manipulation of DNA is normally conducted on E. coli vectors, which contain elements necessary for their maintenance in E. coli. However, vectors may also have elements that allow them to be maintained in another organism such as yeast, plant or mammalian cells, and these vectors are called shuttle vectors. Insertion of a vector into the target or host cell is usually called transformation for bacterial cells and transfection for eukaryotic cells, while insertion of a viral vector is often called transduction.

[0592] In general, engineered vectors comprise an origin of replication, a multicloning site and a selectable marker. The vector itself is generally a nucleotide sequence, commonly a DNA sequence, that comprises an insert (transgene) and a larger sequence that serves as the “backbone” of the vector. While the genetic code determines the polypeptide sequence for a given coding region, other genomic regions can influence when and where these polypeptides are produced. Modern vectors may therefore encompass additional features besides the transgene insert and a backbone: promoter, genetic marker, antibiotic resistance, reporter gene, targeting sequence, protein purification tag. Vectors called expression vectors (expression constructs) specifically are for the expression of the transgene in the target cell, and generally have control sequences.

[0593] The term “control sequences” refers to DNA sequences necessary for the expression of an operably linked coding sequence in a specific host organism. The control sequences that are suitable for prokaryotes, for example, include a promoter, optionally an operator sequence, and a ribosome binding site. Eukaryotic cells are known to utilize promoters, polyadenylation signals, a Kozak sequence and enhancers.

[0594] A nucleic acid is “operably linked” when it is placed into a functional relationship with another nucleic acid sequence. For example, DNA for a presequence or secretory leader is operably linked to DNA for a polypeptide if it is expressed as a preprotein that participates in the secretion of the polypeptide; a promoter or enhancer is operably linked to a coding sequence if it affects the transcription of the sequence; or a ribosome binding site is operably linked to a coding sequence if it is positioned to facilitate translation. Generally, “operably linked” means that the nucleotide sequences being linked are contiguous, and, in the case of a secretory leader, contiguous and in reading phase. However, enhancers do not have to be contiguous. Linking is accomplished by ligation at convenient restriction sites. If such sites do not exist, the synthetic oligonucleotide adaptors or linkers are used in accordance with conventional practice.

[0595] “Transfection” is the process of deliberately introducing nucleic acid molecules or polynucleotides (including vectors) into target cells. The term is mostly used for non-viral methods in eukaryotic cells. Transduction is often used to describe virus-mediated transfer of nucleic acid molecules or polynucleotides. Transfection of animal cells typically involves opening transient pores or “holes” in the cell membrane, to allow the uptake of material. Transfection can be carried out using biological particles (such as viral transfection, also called viral transduction), chemical-based methods (such as using calcium phosphate, lipofection, Fugene, cationic polymers, nanoparticles) or physical treatment (such as electroporation, microinjection, gene gun, cell squeezing, magnetofection, hydrostatic pressure, impalefection, sonication, optical transfection, heat shock).

[0596] The term “transformation” is used to describe non-viral transfer of nucleic acid molecules or polynucleotides (including vectors) into bacteria, and into non-animal eukaryotic cells, including plant cells. Transformation is hence the genetic alteration of a bacterial or non-animal eukaryotic cell resulting from the direct uptake through the cell membrane(s) from its surroundings and subsequent incorporation of exogenous genetic material (nucleic acid molecules). Transformation can be achieved by artificial means. For transformation to happen, cells or bacteria must be in a state of competence, which might occur as a time-limited response to environmental conditions such as starvation and cell density and can also be artificially induced.

[0597] Moreover, the invention provides a host cell transformed or transfected with the polynucleotide/nucleic acid molecule of the invention or with the vector of the invention.

[0598] As used herein, the terms “host cell” or “recipient cell” are intended to include any individual cell or cell culture that can be or has been recipient of vectors, exogenous nucleic acid molecules and/or polynucleotides encoding the construct of the present invention; and/or recipients of the construct itself. The introduction of the respective material into the cell is carried out by way of transformation, transfection and the like (vide supra). The term “host cell” is also intended to include progeny or potential progeny of a single cell. Because certain modifications may occur in succeeding generations due to either natural, accidental, or deliberate mutation or due to environmental influences, such progeny may not, in fact, be completely identical (in morphology or in genomic or total DNA complement) to the parent cell but is still included within the scope of the term as used herein. Suitable host cells include prokaryotic or eukaryotic cells and include—but are not limited to—bacteria (such as E. coli), yeast cells, fungi cells, plant cells, and animal cells such as insect cells and mammalian cells, e.g., hamster, murine, rat, macaque or human.

[0599] In addition to prokaryotes, eukaryotic microbes such as filamentous fungi or yeast are suitable cloning or expression hosts for the construct of the invention. Saccharomyces cerevisiae, or common baker's yeast, is the most commonly used among lower eukaryotic host microorganisms. However, a number of other genera, species, and strains are commonly available and useful herein, such as Schizosaccharomyces pombe, Kluyveromyces hosts such as K. lactis, K. fragilis (ATCC 12424), K. bulgaricus (ATCC 16045), K. wickeramii (ATCC 24178), K. waltii (ATCC 56500), K. drosophilarum (ATCC 36906), K. thermotolerans, and K. marxianus; yarrowia (EP 402 226); Pichia pastoris (EP 183 070); Candida; Trichoderma reesia (EP 244 234); Neurospora crassa; Schwanniomyces such as Schwanniomyces occidentalis; and filamentous fungi such as Neurospora, Penicillium, Tolypocladium, and Aspergillus hosts such as A. nidulans and A. niger.

[0600] Suitable host cells for the expression of a glycosylated construct are derived from multicellular organisms. Examples of invertebrate cells include plant and insect cells. Numerous baculoviral strains and variants and corresponding permissive insect host cells from hosts such as Spodoptera frugiperda (caterpillar), Aedes aegypti (mosquito), Aedes albopictus (mosquito), Drosophila melanogaster (fruit fly), and Bombyx mori (silkmoth) have been identified. A variety of viral strains for transfection are publicly available, e.g., the L-1 variant of Autographa californica NPV and the Bm-5 strain of Bombyx mori NPV, and such viruses may be used as the virus herein according to the present invention, particularly for transfection of Spodoptera frugiperda cells.

[0601] Plant cell cultures of cotton, corn, potato, soybean, petunia, tomato, Arabidopsis and tobacco can also be used as hosts. Cloning and expression vectors useful in the production of proteins in plant cell culture are known to those of skill in the art. See e.g. Hiatt et al., Nature (1989) 342: 76-78, Owen et al. (1992) Bio/Technology 10: 790-794, Artsaenko et al. (1995) The Plant J 8: 745-750, and Fecker et al. (1996) Plant Mol Biol 32: 979-986.

[0602] However, interest has been greatest in vertebrate cells, and propagation of vertebrate cells in culture (cell culture) has become a routine procedure. Examples of useful mammalian host cell lines are monkey kidney CV1 line transformed by SV40 (such as COS-7, ATCC CRL 1651); human embryonic kidney line (such as 293 or 293 cells subcloned for growth in suspension culture, Graham et al., J. Gen Virol. 36: 59 (1977)); baby hamster kidney cells (such as BHK, ATCC CCL 10); Chinese hamster ovary cells/-DHFR (such as CHO, Urlaub et al., Proc. Natl. Acad. Sci. USA 77: 4216 (1980)); mouse sertoli cells (such as TM4, Mather, Biol. Reprod. 23: 243-251 (1980)); monkey kidney cells (such as CVI ATCC CCL 70); African green monkey kidney cells (such as VERO-76, ATCC CRL1587); human cervical carcinoma cells (such as HELA, ATCC CCL 2); canine kidney cells (such as MDCK, ATCC CCL 34); buffalo rat liver cells (such as BRL 3A, ATCC CRL 1442); human lung cells (such as W138, ATCC CCL 75); human liver cells (such as Hep G2,1413 8065); mouse mammary tumor (such as MMT 060562, ATCC CCL-51); TRI cells (Mather et al., Annals N. Y Acad. Sci. (1982) 383: 44-68); MRC 5 cells; FS4 cells; and a human hepatoma line (such as Hep G2).

[0603] In a further embodiment, the invention provides a process for producing a construct of the invention, said process comprising culturing a host cell of the invention under conditions allowing the expression of the construct of the invention and recovering the produced construct from the culture.

[0604] As used herein, the term “culturing” refers to the in vitro maintenance, differentiation, growth, proliferation and/or propagation of cells under suitable conditions in a medium. Cells are grown and maintained in a cell growth medium at an appropriate temperature and gas mixture. Culture conditions vary widely for each cell type. Typical growth conditions are a temperature of about 37° C., a CO2 concentration of about 5% and a humidity of about 95%. Recipes for growth media can vary e.g. in pH, concentration of the carbon source (such as glucose), nature and concentration of growth factors, and the presence of other nutrients (such as amino acids or vitamins). The growth factors used to supplement media are often derived from the serum of animal blood, such as fetal bovine serum (FBS), bovine calf serum (FCS), equine serum, and porcine serum. Cells can be grown either in suspension or as adherent cultures. There are also cell lines that have been modified to be able to survive in suspension cultures, so they can be grown to a higher density than adherent conditions would allow.

[0605] The term “expression” includes any step involved in the production of a construct of the invention including, but not limited to, transcription, post-transcriptional modification, translation, folding, post-translational modification, targeting to specific subcellular or extracellular locations, and secretion. The term “recovering” refers to a series of processes intended to isolate the construct from the cell culture. The “recovering” or “purification” process may separate the protein and non-protein parts of the cell culture, and finally separate the desired construct from all other polypeptides and proteins. Separation steps usually exploit differences in protein size, physico-chemical properties, binding affinity and biological activity. Preparative purifications aim to produce a relatively large quantity of purified proteins for subsequent use, while analytical purification produces a relatively small amount of a protein for a variety of research or analytical purposes.

[0606] When using recombinant techniques, the construct can be produced intracellularly, in the periplasmic space, or directly secreted into the medium. If the construct is produced intracellularly, as a first step, the particulate debris, either host cells or lysed fragments, are removed, for example, by centrifugation or ultrafiltration. The construct of the invention may e.g. be produced in bacteria such as E. coli. After expression, the construct is isolated from the bacterial cell paste in a soluble fraction and can be purified e.g. via affinity chromatography and/or size exclusion. Final purification can be carried out in a manner that is like the process for purifying a construct expressed in mammalian cells and secreted into the medium. Carter et al. (Biotechnology (NY) 1992 February; 10(2):163-7) describe a procedure for isolating antibodies which are secreted to the periplasmic space of E. coli.

[0607] Where the construct is secreted into the medium, supernatants from such expression systems are generally first concentrated using a commercially available protein concentration filter, for example, an ultrafiltration unit.

[0608] The construct of the invention prepared from the host cells can be recovered or purified using, for example, hydroxylapatite chromatography, gel electrophoresis, dialysis, and affinity chromatography. Other techniques for protein purification such as fractionation on an ion-exchange column, mixed mode ion exchange, HIC, ethanol precipitation, size exclusion chromatography, reverse phase HPLC, chromatography on silica, chromatography on heparin sepharose, chromatography on an anion or cation exchange resin (such as a polyaspartic acid column), immunoaffinity (such as Protein A/G/L) chromatography, chromato-focusing, SDS-PAGE, ultracentrifugation, and ammonium sulfate precipitation are also available depending on the construct to be recovered.

[0609] A protease inhibitor may be included in any of the foregoing steps to inhibit proteolysis, and antibiotics may be included to prevent the growth of contaminants.

[0610] Moreover, the invention provides a pharmaceutical composition or formulation comprising a construct of the invention or a construct produced according to the process of the invention.

[0611] As used herein, the term “pharmaceutical composition” relates to a composition which is suitable for administration to a patient, preferably a human patient. The particularly preferred pharmaceutical composition of this invention comprises one or a plurality of the construct(s) of the invention, preferably in a therapeutically effective amount. Preferably, the pharmaceutical composition further comprises suitable formulations of one or more (pharmaceutically effective) carriers, stabilizers, excipients, diluents, solubilizers, surfactants, emulsifiers, preservatives and/or adjuvants. Acceptable constituents of the composition are preferably nontoxic to recipients at the dosages and concentrations employed. Pharmaceutical compositions of the invention include, but are not limited to, liquid, frozen, and lyophilized compositions.

[0612] The compositions may comprise a pharmaceutically acceptable carrier. In general, as used herein, “pharmaceutically acceptable carrier” means all aqueous and non-aqueous solutions, sterile solutions, solvents, buffers, e.g. phosphate buffered saline (PBS) solutions, water, suspensions, emulsions, such as oil/water emulsions, various types of wetting agents, liposomes, dispersion media and coatings, which are compatible with pharmaceutical administration, in particular with parenteral administration. The use of such media and agents in pharmaceutical compositions is well known in the art, and the compositions comprising such carriers can be formulated by well-known conventional methods.

[0613] Certain embodiments provide pharmaceutical compositions comprising the construct of the invention and further one or more excipients such as those illustratively described in this section and elsewhere herein. Excipients can be used in the invention for a wide variety of purposes, such as adjusting physical, chemical, or biological properties of formulations, such as adjustment of viscosity, and or processes of the invention to improve effectiveness and/or to stabilize such formulations and processes against degradation and spoilage e.g. due to stresses that occur during manufacturing, shipping, storage, pre-use preparation, administration, and thereafter. Excipients should in general be used in their lowest effective concentrations.

[0614] In certain embodiments, the pharmaceutical composition may contain formulation materials for modifying, maintaining or preserving certain characteristics of the composition such as the pH, osmolarity, viscosity, clarity, color, isotonicity, odor, sterility, stability, rate of dissolution or release, adsorption or penetration (see, Remington's Pharmaceutical Sciences, 18″ Edition, 1990, Mack Publishing Company). In such embodiments, suitable formulation materials may include, but are not limited to:
[0615] amino acids
[0616] antimicrobials such as antibacterial and antifungal agents
[0617] antioxidants
[0618] buffers, buffer systems and buffering agents that are used to maintain the composition at physiological pH or at a slightly lower pH, typically within a range of from about 5 to about 8 or 9
[0619] non-aqueous solvents, vegetable oils, and injectable organic esters
[0620] aqueous carriers including water, alcoholic/aqueous solutions, emulsions or suspensions, including saline and buffered media
[0621] biodegradable polymers such as polyesters
[0622] bulking agents
[0623] chelating agents
[0624] isotonic and absorption delaying agents
[0625] complexing agents
[0626] fillers
[0627] carbohydrates
[0628] (low molecular weight) proteins, polypeptides or proteinaceous carriers, preferably of human origin
[0629] coloring and flavouring agents
[0630] sulfur containing reducing agents
[0631] diluting agents
[0632] emulsifying agents
[0633] hydrophilic polymers
[0634] salt-forming counter-ions
[0635] preservatives
[0636] metal complexes
[0637] solvents and co-solvents
[0638] sugars and sugar alcohols
[0639] suspending agents
[0640] surfactants or wetting agents
[0641] stability enhancing agents
[0642] tonicity enhancing agents
[0643] parenteral delivery vehicles
[0644] intravenous delivery vehicles

[0645] It is common knowledge that the different constituents of the pharmaceutical composition can have different effects, for example, and amino acid can act as a buffer, a stabilizer and/or an antioxidant; mannitol can act as a bulking agent and/or a tonicity enhancing agent; sodium chloride can act as delivery vehicle and/or tonicity enhancing agent; etc.

[0646] In the context of the present invention, a pharmaceutical composition may comprise:
[0647] (a) a construct as described herein,
[0648] (b) at least one buffer agent,
[0649] (c) at least one saccharide, and
[0650] (d) at least one surfactant;
[0651] wherein the pH of the pharmaceutical composition is in the range of 3.5 to 6.

[0652] In the composition described above, the first domain preferably has an isoelectric point (pI) in the range of 4 to 9.5; the second domain has a pI in the range of 8 to 10, preferably 8.5 to 9.0; and the construct optionally comprises a third domain comprising two polypeptide monomers, each comprising a hinge, a CH2 domain and a CH3 domain, wherein said two polypeptide monomers are fused to each other via a peptide linker;

[0653] In the composition described above, it is further envisaged that the at least one buffer agent is present at a concentration range of 5 to 200 mM, more preferably at a concentration range of 10 to 50 mM. It is also envisaged that the at least one saccharide is selected from the group consisting of monosaccharide, disaccharide, cyclic polysaccharide, sugar alcohol, linear branched dextran or linear non-branched dextran. It is also envisaged that the disacchade is selected from the group consisting of sucrose, trehalose and mannitol, sorbitol, and combinations thereof. It is further envisaged that the sugar alcohol is sorbitol. It is also envisaged that the at least one saccharide is present at a concentration in the range of 1 to 15% (m/V), preferably in a concentration range of 9 to 12% (m/V). It is further envisaged that the construct is present in a concentration range of 0.1 to 8 mg/ml, preferably of 0.2-2.5 mg/ml, more preferably of 0.25-1.0 mg/ml.

[0654] According to one embodiment of the composition described above, the at least one surfactant is selected from the group consisting of polysorbate 20, polysorbate 40, polysorbate 60, polysorbate 80, poloxamer 188, pluronic F68, triton X-100, polyoxyethylen, PEG 3350, PEG 4000 and combinations thereof. It is further envisaged that the at least one surfactant is present at a concentration in the range of 0.004 to 0.5% (m/V), preferably in the range of 0.001 to 0.01% (m/V). It is envisaged that the pH of the composition is in the range of 4.0 to 5.0, preferably 4.2. It is also envisaged that the pharmaceutical composition has an osmolarity in the range of 150 to 500 mOsm. It is further envisaged that the pharmaceutical composition further comprises an excipient selected from the group consisting of one or more polyol(s) and one or more amino acid(s). It is envisaged in the context of the present invention that said one or more excipient is present in the concentration range of 0.1 to 15% (w/N).

[0655] The present invention also provides a pharmaceutical composition comprising (a) the construct as described herein, preferably in a concentration range of 0.1 to 8 mg/ml, preferably of 0.2-2.5 mg/ml, more preferably of 0.25-1.0 mg/ml; (b) 10 mM glutamate or acetate; (c) 9% (m/V) sucrose or 6% (m/V) sucrose and 6% (m/V) hydroxypropyl-o-cyclodextrin; (d) 0.01% (m/V) polysorbate 80; wherein the pH of the liquid pharmaceutical composition is 4.2.

[0656] It is envisaged that the composition of the invention might comprise, in addition to the construct of the invention defined herein, further biologically active agents, depending on the intended use of the composition. Such agents might be drugs acting on the gastro-intestinal system, drugs acting as cytostatica, drugs preventing hyperurikemia, drugs inhibiting immunoreactions, drugs modulating the inflammatory response, drugs acting on the circulatory system and/or agents such as cytokines known in the art. It is also envisaged that the polypeptide construct of the present invention is applied in a co-therapy, i.e., in combination with another anti-cancer medicament.

[0657] In this context, it is envisaged that the pharmaceutical composition of the invention (which comprises a construct comprising a domain which binds to CLDN6 on the surface of a target cell and another domain which binds to CD3 on the surface of a T cell, as described in more detail herein above) furthermore comprises an agent, preferably an antibody or construct, which binds to a protein of the immune checkpoint pathway (such as PD-1 or CTLA-4) or to a co-stimulatory immune checkpoint receptor (such as 4-1BB). The present invention also refers to a combination of a polypeptide construct according to the invention (which comprises a polypeptide construct comprising a domain comprising a paratope (antigen-binding (epitope-binding) structure) which binds to CLDN6 on the surface of a target cell and another domain comprising a paratope (antigen-binding (epitope-binding) structure) which binds to CD3 on the surface of a T cell, as described in more detail herein above) and an agent, preferably an antibody or polypeptide construct, which binds to a protein of the immune checkpoint pathway (such as PD-1 or CTLA-4) or to a co-stimulatory immune checkpoint receptor (such as 4-1BB). Due to the nature of the at least two ingredients of the combination, namely their pharmaceutical activity, the combination can also be referred to as a therapeutic combination. In some embodiments, the combination can be in the form of a pharmaceutical composition or of a kit. According to one embodiment, the pharmaceutical composition or the combination comprises a construct of the invention and an antibody or construct which binds to PD-1. Anti-PD-1 binding proteins useful for this purpose are e.g. described in detail in PCT/US2019/013205 incorporated herein by reference.

[0658] In certain embodiments, the optimal pharmaceutical composition is determined depending upon, for example, the intended route of administration, delivery format and desired dosage. See, for example, Remington's Pharmaceutical Sciences, supra. In certain embodiments, such compositions may influence the physical state, stability, rate of in vivo release and rate of in vivo clearance of the construct of the invention. In certain embodiments, the primary vehicle or carrier in a pharmaceutical composition may be either aqueous or non-aqueous in nature. For example, a suitable vehicle or carrier may be water for injection or physiological saline solution, possibly supplemented with other materials common in compositions for parenteral administration. In certain embodiments, the compositions comprising the construct of the invention may be prepared for storage by mixing the selected composition having the desired degree of purity with optional formulation agents (Remington's Pharmaceutical Sciences, supra) in the form of a lyophilized cake or an aqueous solution. Further, in certain embodiments, the construct of the invention may be formulated as a lyophilizate using appropriate excipients.

[0659] When parenteral administration is contemplated, the therapeutic compositions for use in this invention may be provided in the form of a pyrogen-free, parenterally acceptable aqueous solution comprising the desired construct of the invention in a pharmaceutically acceptable vehicle. A particularly suitable vehicle for parenteral injection is sterile distilled water in which the construct of the invention is formulated as a sterile, isotonic solution, properly preserved. In certain embodiments, the preparation can involve the formulation of the desired molecule with an agent that may provide controlled or sustained release of the product which can be delivered via depot injection, or that may promote sustained duration in the circulation. In certain embodiments, implantable drug delivery devices may be used to introduce the desired construct.

[0660] Additional pharmaceutical compositions will be evident to those skilled in the art, including formulations involving the construct of the invention in sustained or controlled delivery formulations. Techniques for formulating a variety of sustained- or controlled-delivery means are known to those skilled in the art. The construct may also be entrapped in microcapsules prepared, for example, by coacervation techniques or by interfacial polymerization, in colloidal drug delivery systems, or in macroemulsions. Such techniques are disclosed in Remington's Pharmaceutical Sciences, supra.

[0661] Pharmaceutical compositions used for in vivo administration are typically provided as sterile preparations. Sterilization can be accomplished by filtration through sterile filtration membranes. When the composition is lyophilized, sterilization using this method may be conducted either prior to or following lyophilization and reconstitution. Compositions for parenteral administration can be stored in lyophilized form or in a solution. Parenteral compositions are generally placed into a container having a sterile access port, for example, an intravenous solution bag or vial having a stopper pierceable by a hypodermic injection needle.

[0662] Another aspect of the invention includes self-buffering formulations comprising the construct of the invention, which can be used as pharmaceutical compositions, as described in international patent application WO 2006/138181. A variety of publications are available on protein stabilization and formulation materials and methods useful in this regard, such as Arawaka T. et al., Pharm Res. 1991 March; 8(3):285-91; Kendrick et al., “Physical stabilization of proteins in aqueous solution” in: Rational Design of Stable Protein Formulations: Theory and Practice, Carpenter and Manning, eds. Pharmaceutical Biotechnology. 13: 61-84 (2002), and Randolph and Jones, Pharm Biotechnol. 2002; 13:159-75, see particularly the parts pertinent to excipients and processes for self-buffering protein formulations, especially as to protein pharmaceutical products and processes for veterinary and/or human medical uses.

[0663] Salts may be used in accordance with certain embodiments of the invention, e.g. to adjust the ionic strength and/or the isotonicity of a composition or formulation and/or to improve the solubility and/or physical stability of a construct or other ingredient of a composition in accordance with the invention. Ions can stabilize the native state of proteins by binding to charged residues on the protein's surface and by shielding charged and polar groups in the protein and reducing the strength of their electrostatic interactions, attractive, and repulsive interactions. Ions also can stabilize the denatured state of a protein by binding to, particularly the denatured peptide linkages (—CONH) of the protein. Furthermore, ionic interaction with charged and polar groups in a protein also can reduce intermolecular electrostatic interactions and, thereby, prevent or reduce protein aggregation and insolubility.

[0664] Ionic species differ significantly in their effects on proteins. Several categorical rankings of ions and their effects on proteins have been developed that can be used in formulating pharmaceutical compositions in accordance with the invention. One example is the Hofmeister series, which ranks ionic and polar non-ionic solutes by their effect on the conformational stability of proteins in solution. Stabilizing solutes are referred to as “kosmotropic”. Destabilizing solutes are referred to as “chaotropic”. Kosmotropes are commonly used at high concentrations to precipitate proteins from solution (“salting-out”). Chaotropes are commonly used to denature and/or to solubilize proteins (“salting-in”). The relative effectiveness of ions to “salt-in” and “salt-out” defines their position in the Hofmeister series.

[0665] Free amino acids can be used in formulations or compositions comprising the construct of the invention in accordance with various embodiments of the invention as bulking agents, stabilizers, and antioxidants, as well as for other standard uses. Certain amino acids can be used for stabilizing proteins in a formulation, others are useful during lyophilization to ensure correct cake structure and properties of the active ingredient. Some amino acids may be useful to inhibit protein aggregation in both liquid and lyophilized formulations, and others are useful as antioxidants.

[0666] Polyols are kosmotropic and are useful as stabilizing agents in both liquid and lyophilized formulations to protect proteins from physical and chemical degradation processes. Polyols are also useful for adjusting the tonicity of formulations and for protecting against freeze-thaw stresses during transport or the preparation of bulks during the manufacturing process. Polyols can also serve as cryoprotectants in the context of the present invention.

[0667] Certain embodiments of the formulation or composition comprising the construct of the invention can comprise surfactants. Proteins may be susceptible to adsorption on surfaces and to denaturation and resulting aggregation at air-liquid, solid-liquid, and liquid-liquid interfaces. These deleterious interactions generally scale inversely with protein concentration and are typically exacerbated by physical agitation, such as that generated during the shipping and handling of a product. Surfactants are routinely used to prevent, minimize, or reduce surface adsorption. Surfactants also are commonly used to control protein conformational stability. The use of surfactants in this regard is protein specific, since one specific surfactant will typically stabilize some proteins and destabilize others.

[0668] Certain embodiments of the formulation or composition comprising the construct of the invention can comprise one or more antioxidants. To some extent deleterious oxidation of proteins can be prevented in pharmaceutical formulations by maintaining proper levels of ambient oxygen and temperature and by avoiding exposure to light. Antioxidant excipients can also be used to prevent oxidative degradation of proteins. It is envisaged that antioxidants for use in therapeutic protein formulations in accordance with the present invention can be water-soluble and maintain their activity throughout the shelf life of the product (the composition comprising the construct). Antioxidants can also damage proteins and should hence—among other things—be selected in a way to eliminate or sufficiently reduce the possibility of antioxidants damaging the construct or other proteins in the formulation.

[0669] Certain embodiments of the formulation or composition comprising the construct of the invention can comprise one or more preservatives. Preservatives are necessary for example when developing multi-dose parenteral formulations that involve more than one extraction from the same container. Their primary function is to inhibit microbial growth and ensure product sterility throughout the shelf-life or term of use of the drug product. Although preservatives have a long history of use with small-molecule parenterals, the development of protein formulations that include preservatives can be challenging. Preservatives very often have a destabilizing effect (aggregation) on proteins, and this has become a major factor in limiting their use in multi-dose protein formulations. To date, most protein drugs have been formulated for single-use only. However, when multi-dose formulations are possible, they have the added advantage of enabling patient convenience, and increased marketability. A good example is that of human growth hormone (hGH) where the development of preserved formulations has led to commercialization of more convenient, multi-use injection pen presentations. Several aspects need to be considered during the formulation and development of preserved dosage forms. The effective preservative concentration in the drug product must be optimized. This requires testing a given preservative in the dosage form with concentration ranges that confer anti-microbial effectiveness without compromising protein stability.

[0670] As might be expected, development of liquid formulations containing preservatives are more challenging than lyophilized formulations. Freeze-dried products can be lyophilized without the preservative and reconstituted with a preservative containing diluent at the time of use. This shortens the time during which a preservative is in contact with the construct, significantly minimizing the associated stability risks. With liquid formulations, preservative effectiveness and stability should be maintained over the entire product shelf-life. An important point to note is that preservative effectiveness should be demonstrated in the final formulation containing the active drug and all excipient components. Once the pharmaceutical composition has been formulated, it may be stored in sterile vials as a solution, suspension, gel, emulsion, solid, crystal, or as a dehydrated or lyophilized powder. Such formulations may be stored either in a ready-to-use form or in a form (e.g., lyophilized) that is reconstituted prior to administration.

[0671] The biological activity of the pharmaceutical composition defined herein can be determined for instance by in vitro cytotoxicity assays, as described in the following examples, in WO 99/54440 or by Schlereth et al. (Cancer Immunol. Immunother. 20 (2005), 1-12). “Efficacy” or “in vivo efficacy” as used herein refers to the response to therapy by the pharmaceutical composition of formulation of the invention, using e.g. standardized NCI response criteria. The success or in vivo efficacy of the therapy using a pharmaceutical composition of the invention refers to the effectiveness of the composition for its intended purpose, i.e. the ability of the composition to cause its desired effect, i.e. depletion of pathologic cells, e.g. tumor cells. The in vivo efficacy may be monitored by established standard methods for the respective disease entities including, but not limited to, white blood cell counts, differentials, fluorescence activated cell sorting, bone marrow aspiration. In addition, various disease specific clinical chemistry parameters and other established standard methods may be used. Furthermore, computer-aided tomography, X-ray, nuclear magnetic resonance tomography, positron-emission tomography scanning, lymph node biopsies/histologies and other established standard methods may be used.

[0672] Another major challenge in the development of drugs such as the pharmaceutical composition of the invention is the predictable modulation of pharmacokinetic properties. To this end, a pharmacokinetic profile of the drug candidate, i.e. a profile of the pharmacokinetic parameters that affect the ability of a specific drug to treat a given condition, can be established. Pharmacokinetic parameters of the drug influencing the ability of a drug for treating a certain disease entity include, but are not limited to: half-life, volume of distribution, hepatic first-pass metabolism and the degree of blood serum binding. The efficacy of a given drug agent can be influenced by each of the parameters mentioned above.

[0673] “Half-life” is the time required for a quantity to reduce to half its initial value. The medical sciences refer to the half-life of substances or drugs in the human body. In a medical context, half-life may refer to the time it takes for a substance/drug to lose one-half of its activity, e.g. pharmacologic, physiologic, or radiological activity. The half-life may also describe the time that it takes for the concentration of a drug or substance (e.g., a construct of the invention) in blood plasma/serum to reach one-half of its steady-state value (“serum half-life”). Typically, the elimination or removal of an administered substance/drug refers to the body's cleansing through biological processes such as metabolism, excretion, also involving the function of kidneys and liver. The “first-pass metabolism” is a phenomenon of drug metabolism whereby the concentration of a drug is reduced before it reaches the circulation. It is the fraction of drug lost during the process of absorption. Accordingly, by “hepatic first-pass metabolism” is meant the propensity of a drug to be metabolized upon first contact with the liver, i.e. during its first pass through the liver. “Volume of distribution” (VD) means the degree to which a drug is distributed in body tissue rather than the blood plasma, a higher VD indicating a greater amount of tissue distribution. The retention of a drug can occur throughout the various compartments of the body, such as intracellular and extracellular spaces, tissues and organs, etc. “Degree of blood serum binding” means the propensity of a drug to interact with and bind to blood serum proteins, such as albumin, leading to a reduction or loss of biological activity of the drug.

[0674] Pharmacokinetic parameters also include bioavailability, lag time (T lag), Tmax, absorption rates, and/or Cmax for a given amount of drug administered. “Bioavailability” refers to the fraction of an administered dose of a drug/substance that reaches the systemic circulation (the blood compartment). When a medication is administered intravenously, its bioavailability is considered to be 100%. However, when a medication is administered via other routes (such as orally), its bioavailability generally decreases. “Lag time” means the time delay between the administration of the drug and its detection and measurability in blood or plasma. Cmax is the maximum plasma concentration that a drug achieves after its administration (and before the administration of a second dose). Tmax is the time at which Cmax is reached. The time to reach a blood or tissue concentration of the drug which is required for its biological effect is influenced by all parameters. Pharmacokinetic parameters of constructs exhibiting cross-species specificity may be determined in preclinical animal testing in non-chimpanzee primates as outlined above and set forth e.g. in Schlereth et al. (supra).

[0675] One embodiment provides the construct of the invention (or the construct produced according to the process of the invention), for the use as a medicament, particularly for the use in the prevention, treatment or amelioration of a disease, preferably a neoplasm. Another embodiment provides the use of the construct of the invention (or of the construct produced according to the process of the invention) in the manufacture of a medicament for the prevention, treatment or amelioration of a disease, preferably a neoplasm. It is also envisaged to provide a method for the prevention, treatment or amelioration of a disease, preferably a neoplasm, comprising the step of administering to a subject in need thereof the construct of the present invention (or the construct produced according to the process of the present invention). The terms “subject in need”, “patient” or those “in need of treatment” include those already with the disease, as well as those in which the disease is to be prevented. The terms also include human and other mammalian subjects that receive either prophylactic or therapeutic treatment.

[0676] The polypeptides/polypeptide constructs of the invention and the formulations/pharmaceutical compositions described herein are useful in the treatment, amelioration and/or prevention of the medical condition as described herein in a patient in need thereof. The term “treatment” refers to both therapeutic treatment and prophylactic or preventative measures. Treatment includes the application or administration of the polypeptides/polypeptide constructs/pharmaceutical composition to the body, to an isolated tissue, or to a cell from a patient or a subject in need who has a disease/disorder as described herein, a symptom of such disease/disorder, or a predisposition toward such disease/disorder, with the purpose to cure, heal, alleviate, relieve, alter, remedy, ameliorate, improve, or affect the disease, the symptom of the disease, or the predisposition toward the disease. The term “amelioration” as used herein refers to any improvement of the disease state of a patient, by the administration of a polypeptide construct according to the invention to such patient or subject in need thereof. Such an improvement may be a slowing down or stopping of the progression of the disease of the patient, and/or as a decrease in severity of disease symptoms, an increase in frequency or duration of disease symptom-free periods or a prevention of impairment or disability due to the disease. The term “prevention” as used herein means the avoidance of the occurrence or of the re-occurrence of a disease as specified herein, by the administration of a construct according to the invention to a subject in need thereof.

[0677] The term “disease” refers to any condition that would benefit from treatment with the construct or the pharmaceutical composition described herein. This includes chronic and acute disorders or diseases including those pathological conditions that predispose the mammal to the disease in question. The disease is preferably a neoplasm, cancer or tumor. The disease, neoplasm, cancer or tumor is preferably CLDN6 positive, i.e. it is characterized by expression or overexpression of CLDN6. An overexpression of CLDN6 means that there is an increase by at least 10%, in particular at least 25%, at least 50%, at least 100%, at least 250%, at least 500%, at least 750%, at least 1000% or even more. Expression is only found in a diseased tissue, while expression in a corresponding healthy tissue is not or significantly not detectable. According to the invention, diseases associated with cells expressing CLDN6 include cancer diseases. Furthermore, according to the invention, cancer diseases preferably are those wherein the cancer cells express CLDN6.

[0678] A “neoplasm” is an abnormal growth of tissue, usually but not always forming a mass. When also forming a mass, it is commonly referred to as a “tumor”. Neoplasms or tumors can be benign, potentially malignant (pre-cancerous), or malignant (cancerous). Malignant neoplasms/tumors are commonly called cancer. They usually invade and destroy the surrounding tissue and may form metastases, i.e., they spread to other parts, tissues or organs of the body. A “primary tumor” is a tumor growing at the anatomical site where tumor progression began and proceeded to yield a cancerous mass. Most cancers develop at their primary site but then go on to metastasize or spread to other parts (e.g. tissues and organs) of the body. These further tumors are “secondary tumors”. Most cancers continue to be called after their primary site, even after they have spread to other parts of the body.

[0679] Lymphomas and leukemias are lymphoid neoplasms. For the purposes of the present invention, they are also encompassed by the terms “tumor” and “cancer”. For the purposes of the present invention, the terms “neoplasm”, “tumor” and “cancer” may be used interchangeably, and they comprise both primary tumors/cancers and secondary tumors/cancers (or “metastases”) as well as mass-forming neoplasms (tumors) and lymphoid neoplasms (such as lymphomas and leukemias), and minimal residual disease (MRD).

[0680] The term “minimal residual disease” (MRD) refers to the evidence for the presence of small numbers of residual cancer cells that remain in the patient after cancer treatment, e.g. when the patient is in remission (no symptoms or signs of disease). A very small number of remaining cancer cells usually cannot be detected by routine means because the standard tests used to assess or detect cancer are not sensitive enough to detect MRD. Nowadays, very sensitive molecular biology tests for MRD are available, such as flow cytometry, PCR and next-generation sequencing. These tests can measure minimal levels of cancer cells in tissue samples, sometimes as low as one cancer cell in a million normal cells. In the context of the present invention, the terms “prevention”, “treatment” or “amelioration” of a cancer are envisaged to also encompass “prevention, treatment or amelioration of MRD”, whether the MRD was detected or not.

[0681] In one embodiment of the invention, the neoplasm, cancer or tumor is selected from the group including, but not limited to, (or consisting of) germ cell cancer, ovarian cancer and lung cancer.

[0682] According to one embodiment of the invention, the ovarian cancer is ovarian epithelial cancer selected from the group comprising mucinous endometrioid, clear cell and undifferentiated ovarian cancer, ovarian stromal tumors including include granulosa cell tumors, granulosa-theca tumors and Sertoli-Leydig tumors, ovarian germ cell tumors comprising Teratomas, dysgerminoma ovarian germ cell cancer, endodermal sinus tumor (yolk sac tumor) and choriocarcinoma tumors, from Ovarian sarcomas, Krukenberg tumors, or Ovarian cysts. According to another embodiment, the ovarian cancer is recurrent or relapsed ovarian cancer, or an ovarian cancer that is refractory to plantinum and/or standard chemotherapy treatments. Treatment efficacy can be determined by measuring CA-125. CA-125 is a protein found in the blood. High amounts of CA-125 may indicate ovarian, fallopian tube cancer, and decreasing amounts may indicate efficacy of the selected treatment. Hereditary factors that may predispose the development of ovarian cancer are mutations on one of two genes called breast cancer gene 1 (BRCA1) and breast cancer gene 2 (BRCA2). Women with the BRCA1 mutation have a 35 to 70 percent higher risk of ovarian cancer. Women with the BRCA2 mutation have a 10 to 30 percent higher risk (www.cancercenter.com/cancer-types/ovarian-cancer/risk-factors). However, most women who are diagnosed with ovarian cancer do not have these mutations.

[0683] According to a further embodiment of the invention, the lung cancer is non-small cell lung cancer, which may be further selected from the group comprising squamous cell carcinoma, large cell carcinoma, and adenocarcinoma. Subsets of adenocarcinoma can be defined by specific mutations in genes encoding components of the epidermal growth factor receptor (EGFR) and downstream mitogen-activated protein kinases (MAPK) and phosphatidylinositol 3-kinases (PI3K) signaling pathways. Genetic abnormalities of potential relevance to treatment decisions include translocations involving the anaplastic lymphoma kinase (ALK)-tyrosine kinase receptor, which are sensitive to ALK inhibitors, and amplification of MET (mesenchymal epithelial transition factor), which encodes the hepatocyte growth factor receptor. MET amplification has been associated with secondary resistance to EGFR tyrosine kinase inhibitors.

[0684] The construct of the invention will generally be designed for specific routes and methods of administration, for specific dosages and frequencies of administration, for specific treatments of specific diseases, with ranges of bio-availability and persistence, among other things. The materials of the composition are preferably formulated in concentrations that are acceptable for the site of administration. Formulations and compositions thus may be designed in accordance with the invention for delivery by any suitable route of administration. In the context of the present invention, the routes of administration include, but are not limited to topical routes, enteral routes and parenteral routes.

[0685] If the pharmaceutical composition has been lyophilized, the lyophilized material is first reconstituted in an appropriate liquid prior to administration. The lyophilized material may be reconstituted in, e.g., bacteriostatic water for injection (BWFI), physiological saline, phosphate buffered saline (PBS), or the same formulation the protein had been in prior to lyophilization. The pharmaceutical compositions and the construct of this invention are particularly useful for parenteral administration, e.g., intravenous delivery, for example by injection or infusion. Pharmaceutical compositions may be administered using a medical device. Examples of medical devices for administering pharmaceutical compositions are described in U.S. Pat. Nos. 4,475,196; 4,439,196; 4,447,224; 4,447,233; 4,486,194; 4,487,603; 4,596,556; 4,790,824; 4,941,880; 5,064,413; 5,312,335; 5,312,335; 5,383,851; and 5,399,163.

[0686] The compositions of the present invention can be administered to the subject at a suitable dose which can be determined e.g. in dose escalating studies. As set forth above, the construct of the invention exhibiting cross-species specificity as described herein can also be advantageously used in in preclinical testing in non-chimpanzee primates. The dosage regimen will be determined by the attending physician and clinical factors. As is well known in the medical art, dosages for any one patient depend upon many factors, including the patient's size, body surface area, age, the specific compound to be administered, sex, time and route of administration, general health, and other drugs being administered concurrently.

[0687] An “effective dose” is an amount of a therapeutic agent that is sufficient to achieve or at least partially achieve a desired effect. A “therapeutically effective dose” is an amount that is sufficient to cure or at least partially arrest the disease and its complications, signs and symptoms in a patient suffering from the disease. Amounts or doses effective for this use will depend on the disease to be treated (the indication), the delivered construct, the therapeutic context and objectives, the severity of the disease, prior therapy, the patient's clinical history and response to the therapeutic agent, the route of administration, the size (body weight, body surface) and/or condition (the age and general health) of the patient, and the general state of the patient's own immune system. The proper dose can be adjusted according to the judgment of the attending physician, to obtain the optimal therapeutic effect.

[0688] A therapeutically effective amount of a construct of the invention preferably results in a decrease in severity of disease symptoms, an increase in frequency or duration of disease symptom-free periods or a prevention of impairment or disability due to the disease. In the treatment of CLDN6-expressing tumors, a therapeutically effective amount of the construct of the invention preferably inhibits tumor cell growth by at least about 20%, at least about 40%, at least about 50%, at least about 60%, at least about 70%, at least about 80%, or at least about 90% relative to untreated patients. The ability of a compound to inhibit tumor growth may also be evaluated in an animal model predictive of efficacy in human tumors.

[0689] In a further embodiment, the invention provides a kit comprising a construct of the invention, a construct produced according to the process of the invention, a polynucleotide of the invention, a vector of the invention, and/or a host cell of the invention. In the context of the present invention, the term “kit” means two or more components—one of which corresponding to the construct, the pharmaceutical composition, the polynucleotide, the vector or the host cell of the invention—packaged together in a container, recipient or otherwise. A kit can hence be described as a set of products and/or utensils that are sufficient to achieve a certain goal, which can be marketed as a single unit.

[0690] It is envisaged that a further component of the kit of the invention is an agent, preferably an antibody or construct, which binds to a protein of the immune checkpoint pathway (such as PD-1 or CTLA-4) or to a co-stimulatory immune checkpoint receptor (such as 4-1BB). These agents are described in more detail herein above. According to one embodiment, the kit comprises a construct of the invention and an antibody or construct which binds to PD-1. Anti-PD-1 binding proteins useful for this purpose are e.g. described in detail in PCT/US2019/013205. In certain embodiment, the kit allows for for the simultaneous and/or sequential administration of the components.

[0691] The kit may comprise one or more recipients (such as vials, ampoules, containers, syringes, bottles, bags) of any appropriate shape, size and material (preferably waterproof, e.g. plastic or glass) containing the construct or the pharmaceutical composition of the present invention in an appropriate dosage for administration (see above). The kit may additionally contain directions for use (e.g. in the form of a leaflet or instruction manual), means for administering the construct or the pharmaceutical composition of the present invention such as a syringe, pump, infuser or the like, means for reconstituting the construct of the invention and/or means for diluting the construct of the invention.

[0692] The invention also provides kits for a single-dose administration unit. The kit of the invention may also contain a first recipient comprising a dried/lyophilized construct or pharmaceutical composition and a second recipient comprising an aqueous formulation. In certain embodiments of this invention, kits containing single-chambered and multi-chambered pre-filled syringes are provided.

[0693] The present invention refers to the following items:
[0694] i) A polypeptide or polypeptide construct comprising or consisting of
[0695] a domain (comprising a paratope) which binds to human CLDN6 (SEQ ID NO: 1) on the surface of a target cell, and
[0696] a domain (comprising a paratope) which binds to human CD3, and
[0697] a domain extending the half-life of the polypeptide.
[0698] ii) The polypeptide or polypeptide construct according to item i), wherein said polypeptide construct is T-cell activating construct.
[0699] iii) The polypeptide or polypeptide construct according to any one of item i) and ii), wherein said polypeptide construct is a T-cell activating polypeptide as determined by a T cell activation assay selected from the group comprising determining the expression quantity of CD69, determining the expression quantity of CD25, determining the quantity of secreted IL-2, and determining the cytolytic activity of the T cells.
[0700] iv) The polypeptide or polypeptide construct according to any one of items i) to iii), wherein the domain which extends the half-life of the polypeptide comprises, or consists of, two polypeptide monomers, each comprising a hinge, a CH2 domain and a CH3 domain.
[0701] v) The polypeptide or polypeptide construct according to any one of items i) to iv), wherein the antigen-binding (epitope-binding) domain binding CLDN6 comprises, or consists of, a paratope that binds to an epitope within human CLDN6 which corresponds to amino acids 29-81 of SEQ ID NO. 1 (UniProt entry P56747).
[0702] vi) The polypeptide or polypeptide construct according to any one of items i) to v), wherein the first antigen-binding (epitope-binding) domain binding CLDN6 comprises, or consists of, a paratope that binds to an epitope within human CLDN6 which corresponds to amino acids 138-160 of SEQ ID NO. 1 (UniProt entry P56747).
[0703] vii) The polypeptide or polypeptide construct according to any one of items i) to vi), wherein said domain comprising, or consisting of, a paratope which binds to CLDN6 binds to amino acids 29-39 of SEQ ID NO: 1 in the extracellular loop 1 (ECL1) of CLDN6 as depicted in SEQ ID NO: 9 and/or to amino acids 151-160 of SEQ ID NO: 1 in the extracellular loop 2 (ECL2) of CLDN6 on the surface of a target cell as depicted in SEQ ID NO: 10; It is clear that a binder does not require a direct chemical interaction within the sequences depicted in SEQ ID NOs: 9 and 10, but that at least one or more amino acids in these sequences are in direct contact, e.g. through hydrogen bonds, with one and generally more amino acids of the binding domain. General principles of interactions between a binding domain (i.e. the paratope) and the target domain (i.e the epitope) are known in the art (cf. Janeway et al. Immunobiology, 9th Ed., 2016).
[0704] viii) The polypeptide or polypeptide construct according to any one of items i) to vii), wherein said domain comprising, or consisting of, a paratope binding to CD3 binds to an extracellular epitope of the human and the Macaca CD3ε chain.
[0705] ix) The polypeptide or polypeptide construct according to any one of items i) to viii), wherein the paratope that binds to CLDN6 binds to the same epitope on CLDN6 as a polypeptide construct or an antibody or derivative or fragment thereof that comprise a domain comprising a paratope binding to CLDN6 on the surface of a target cell, wherein the paratope comprises complementarity determining regions CDR-H1, CDR-H2, and CDR-H3 of a variable heavy (VH) chain and/or complementarity determining regions CDR-L1, CDR-L2, and CDR-L3 of a variable light (VL) chain selected from the groups depicted in a) to s) below, a) to d), n) and s) being preferred, a) to c), e) and s) being very preferred):
[0706] a) a VH region comprising a CDR-H1 depicted in SEQ ID NO: 13, a CDR-H2 depicted in SEQ ID NO: 14, and a CDR-H3 depicted in SEQ ID NO: 15, and a VL region comprising a CDR-L1 depicted in SEQ ID NO: 16, a CDR-L2 depicted in SEQ ID NO: 17 and a CDR-L3 depicted in SEQ ID NO: 18;
[0707] b) a VH region comprising a CDR-H1 depicted in SEQ ID NO: 27, a CDR-H2 depicted in SEQ ID NO: 28, and a CDR-H3 depicted in SEQ ID NO: 29, and a VL region comprising a CDR-L1 depicted in SEQ ID NO: 30, a CDR-L2 depicted in SEQ ID NO: 31 and a CDR-L3 depicted in SEQ ID NO: 32;
[0708] c) a VH region comprising a CDR-H1 depicted in SEQ ID NO: 41, a CDR-H2 depicted in SEQ ID NO: 42, and a CDR-H3 depicted in SEQ ID NO: 43, and a VL region comprising a CDR-L1 depicted in SEQ ID NO: 44, a CDR-L2 depicted in SEQ ID NO: 45 and a CDR-L3 depicted in SEQ ID NO: 46;
[0709] d) a VH region comprising a CDR-H1 depicted in SEQ ID NO: 55, a CDR-H2 depicted in SEQ ID NO: 56, and a CDR-H3 depicted in SEQ ID NO: 57, and a VL region comprising a CDR-L1 depicted in SEQ ID NO: 58, a CDR-L2 depicted in SEQ ID NO: 59 and a CDR-L3 depicted in SEQ ID NO: 60;
[0710] e) a VH region comprising a CDR-H1 depicted in SEQ ID NO: 69, a CDR-H2 depicted in SEQ ID NO: 70, and a CDR-H3 depicted in SEQ ID NO: 71, and a VL region comprising a CDR-L1 depicted in SEQ ID NO: 72, a CDR-L2 depicted in SEQ ID NO: 73 and a CDR-L3 depicted in SEQ ID NO: 74;
[0711] f) a VH region comprising a CDR-H1 depicted in SEQ ID NO: 83, a CDR-H2 depicted in SEQ ID NO: 84, and a CDR-H3 depicted in SEQ ID NO: 85, and a VL region comprising a CDR-L1 depicted in SEQ ID NO: 86, a CDR-L2 depicted in SEQ ID NO: 87 and a CDR-L3 depicted in SEQ ID NO: 88;
[0712] g) a VH region comprising a CDR-H1 depicted in SEQ ID NO: 97, a CDR-H2 depicted in SEQ ID NO: 98, and a CDR-H3 depicted in SEQ ID NO: 99, and a VL region comprising a CDR-L1 depicted in SEQ ID NO: 100, a CDR-L2 depicted in SEQ ID NO: 101 and a CDR-L3 depicted in SEQ ID NO: 102;
[0713] h) a VH region comprising a CDR-H1 depicted in SEQ ID NO: 111, a CDR-H2 depicted in SEQ ID NO: 112, and a CDR-H3 depicted in SEQ ID NO: 113, and a VL region comprising a CDR-L1 depicted in SEQ ID NO: 114, a CDR-L2 depicted in SEQ ID NO: 115 and a CDR-L3 depicted in SEQ ID NO: 116;
[0714] i) a VH region comprising a CDR-H1 depicted in SEQ ID NO: 125, a CDR-H2 depicted in SEQ ID NO: 126, and a CDR-H3 depicted in SEQ ID NO: 127, and a VL region comprising a CDR-L1 depicted in SEQ ID NO: 128, a CDR-L2 depicted in SEQ ID NO: 129 and a CDR-L3 depicted in SEQ ID NO: 130;
[0715] j) a VH region comprising a CDR-H1 depicted in SEQ ID NO: 139, a CDR-H2 depicted in SEQ ID NO: 140, and a CDR-H3 depicted in SEQ ID NO: 141, and a VL region comprising a CDR-L1 depicted in SEQ ID NO: 142, a CDR-L2 depicted in SEQ ID NO: 143 and a CDR-L3 depicted in SEQ ID NO: 144;
[0716] k) a VH region comprising a CDR-H1 depicted in SEQ ID NO: 153, a CDR-H2 depicted in SEQ ID NO: 154, and a CDR-H3 depicted in SEQ ID NO: 155, and a VL region comprising a CDR-L1 depicted in SEQ ID NO: 156, a CDR-L2 depicted in SEQ ID NO: 157 and a CDR-L3 depicted in SEQ ID NO: 158;
[0717] l) a VH region comprising a CDR-H1 depicted in SEQ ID NO: 167, a CDR-H2 depicted in SEQ ID NO: 168, and a CDR-H3 depicted in SEQ ID NO: 169, and a VL region comprising a CDR-L1 depicted in SEQ ID NO: 170, a CDR-L2 depicted in SEQ ID NO: 171 and a CDR-L3 depicted in SEQ ID NO: 172;
[0718] m) a VH region comprising a CDR-H1 depicted in SEQ ID NO: 181, a CDR-H2 depicted in SEQ ID NO: 182, and a CDR-H3 depicted in SEQ ID NO: 183, and a VL region comprising a CDR-L1 depicted in SEQ ID NO: 184, a CDR-L2 depicted in SEQ ID NO: 185 and a CDR-L3 depicted in SEQ ID NO: 186;
[0719] n) a VH region comprising a CDR-H1 depicted in SEQ ID NO: 195, a CDR-H2 depicted in SEQ ID NO: 196, and a CDR-H3 depicted in SEQ ID NO: 197, and a VL region comprising a CDR-L1 depicted in SEQ ID NO: 198, a CDR-L2 depicted in SEQ ID NO: 199 and a CDR-L3 depicted in SEQ ID NO: 200;
[0720] o) a VH region comprising a CDR-H1 depicted in SEQ ID NO: 209, a CDR-H2 depicted in SEQ ID NO: 210, and a CDR-H3 depicted in SEQ ID NO: 211, and a VL region comprising, or consisting of, a CDR-L1 depicted in SEQ ID NO: 212, a CDR-L2 depicted in SEQ ID NO: 213 and a CDR-L3 depicted in SEQ ID NO: 214;
[0721] p) a VH region comprising a CDR-H1 depicted in SEQ ID NO: 223, a CDR-H2 depicted in SEQ ID NO: 224, and a CDR-H3 depicted in SEQ ID NO: 225, and a VL region comprising, or consisting of, a CDR-L1 depicted in SEQ ID NO: 226, a CDR-L2 depicted in SEQ ID NO: 227 and a CDR-L3 depicted in SEQ ID NO: 228;
[0722] q) a VH region comprising a CDR-H1 depicted in SEQ ID NO: 237, a CDR-H2 depicted in SEQ ID NO: 238, and a CDR-H3 depicted in SEQ ID NO: 239, and a VL region comprising, or consisting of, a CDR-L1 depicted in SEQ ID NO: 240, a CDR-L2 depicted in SEQ ID NO: 241 and a CDR-L3 depicted in SEQ ID NO: 242;
[0723] r) a VH region comprising a CDR-H1 depicted in SEQ ID NO: 251, a CDR-H2 depicted in SEQ ID NO: 252, and a CDR-H3 depicted in SEQ ID NO: 253, and a VL region comprising, or consisting of, a CDR-L1 depicted in SEQ ID NO: 254, a CDR-L2 depicted in SEQ ID NO: 255 and a CDR-L3 as depicted in SEQ ID NO: 256,
[0724] s) a VH region comprising a CDR-H1 depicted in SEQ ID NO: 265, a CDR-H2 depicted in SEQ ID NO: 266, and a CDR-H3 depicted in SEQ ID NO: 267, and a VL region comprising, or consisting of, a CDR-L1 depicted in SEQ ID NO: 268, a CDR-L2 depicted in SEQ ID NO: 269, and a CDR-L3 as depicted in SEQ ID NO: 270.
[0725] x) The polypeptide or polypeptide construct according to any one of items i) to ix), wherein the domain (comprising, or consisting of, the paratope) binding to human CD3 epsilon also binds to Callithrix jacchus or Saimiri sciureus CD3 epsilon.
[0726] xi) The polypeptide or polypeptide construct according to any one of items i) to x), wherein
[0727] a) the polypeptide or construct is a single chain construct,
[0728] b) the domain (comprising a paratope) binding to CLDN6 is in the format of an scFv,
[0729] c) the domain (comprising a paratope) binding to CD3 is in the format of an scFv,
[0730] d) the domains (comprising the paratopes) are connected via a linker, and/or
[0731] e) the polypeptide or polypeptide construct comprises a domain providing an extended serum half-life.
[0732] xii) The polypeptide or polypeptide construct according to any one of items i) to xi), wherein the domain (comprising, or consisting of, the paratope) binding to CLDN6 does not bind to CLDN1, CLDN2, CLDN3, CLDN4, CLDN9, and/or CLDN18.1/CLDN18.2.
[0733] xiii) The polypeptide or polypeptide construct according to any one of the preceding items, wherein the domain (comprising, or consisting of, a paratope) binding to CLDN6 comprises a VH region comprising a CDR-H1, a CDR-H2 and a CDR-H3 and a VL region comprising a CDR-L1, a CDR-L2 and a CDR-L3 selected from the groups depicted in in a) to s) below, a) to d), n) and s) being preferred, a) to c), e) and s) being very preferred):
[0734] a) a VH region comprising a CDR-H1 depicted in SEQ ID NO: 13, a CDR-H2 depicted in SEQ ID NO: 14, and a CDR-H3 depicted in SEQ ID NO: 15, and a VL region comprising a CDR-L1 depicted in SEQ ID NO: 16, a CDR-L2 depicted in SEQ ID NO: 17 and a CDR-L3 depicted in SEQ ID NO: 18;
[0735] b) a VH region comprising a CDR-H1 depicted in SEQ ID NO: 27, a CDR-H2 depicted in SEQ ID NO: 28, and a CDR-H3 depicted in SEQ ID NO: 29, and a VL region comprising a CDR-L1 depicted in SEQ ID NO: 30, a CDR-L2 depicted in SEQ ID NO: 31 and a CDR-L3 depicted in SEQ ID NO: 32;
[0736] c) a VH region comprising a CDR-H1 depicted in SEQ ID NO: 41, a CDR-H2 depicted in SEQ ID NO: 42, and a CDR-H3 depicted in SEQ ID NO: 43, and a VL region comprising a CDR-L1 depicted in SEQ ID NO: 44, a CDR-L2 depicted in SEQ ID NO: 45 and a CDR-L3 depicted in SEQ ID NO: 46;
[0737] d) a VH region comprising a CDR-H1 depicted in SEQ ID NO: 55, a CDR-H2 depicted in SEQ ID NO: 56, and a CDR-H3 depicted in SEQ ID NO: 57, and a VL region comprising a CDR-L1 depicted in SEQ ID NO: 58, a CDR-L2 depicted in SEQ ID NO: 59 and a CDR-L3 depicted in SEQ ID NO: 60;
[0738] e) a VH region comprising a CDR-H1 depicted in SEQ ID NO: 69, a CDR-H2 depicted in SEQ ID NO: 70, and a CDR-H3 depicted in SEQ ID NO: 71, and a VL region comprising a CDR-L1 depicted in SEQ ID NO: 72, a CDR-L2 depicted in SEQ ID NO: 73 and a CDR-L3 depicted in SEQ ID NO: 74;
[0739] f) a VH region comprising a CDR-H1 depicted in SEQ ID NO: 83, a CDR-H2 depicted in SEQ ID NO: 84, and a CDR-H3 depicted in SEQ ID NO: 85, and a VL region comprising a CDR-L1 depicted in SEQ ID NO: 86, a CDR-L2 depicted in SEQ ID NO: 87 and a CDR-L3 depicted in SEQ ID NO: 88;
[0740] g) a VH region comprising a CDR-H1 depicted in SEQ ID NO: 97, a CDR-H2 depicted in SEQ ID NO: 98, and a CDR-H3 depicted in SEQ ID NO: 99, and a VL region comprising a CDR-L1 depicted in SEQ ID NO: 100, a CDR-L2 depicted in SEQ ID NO: 101 and a CDR-L3 depicted in SEQ ID NO: 102;
[0741] h) a VH region comprising a CDR-H1 depicted in SEQ ID NO: 111, a CDR-H2 depicted in SEQ ID NO: 112, and a CDR-H3 depicted in SEQ ID NO: 113, and a VL region comprising a CDR-L1 depicted in SEQ ID NO: 114, a CDR-L2 depicted in SEQ ID NO: 115 and a CDR-L3 depicted in SEQ ID NO: 116;
[0742] i) a VH region comprising a CDR-H1 depicted in SEQ ID NO: 125, a CDR-H2 depicted in SEQ ID NO: 126, and a CDR-H3 depicted in SEQ ID NO: 127, and a VL region comprising a CDR-L1 depicted in SEQ ID NO: 128, a CDR-L2 depicted in SEQ ID NO: 129 and a CDR-L3 depicted in SEQ ID NO: 130;
[0743] j) a VH region comprising a CDR-H1 depicted in SEQ ID NO: 139, a CDR-H2 depicted in SEQ ID NO: 140, and a CDR-H3 depicted in SEQ ID NO: 141, and a VL region comprising a CDR-L1 depicted in SEQ ID NO: 142, a CDR-L2 depicted in SEQ ID NO: 143 and a CDR-L3 depicted in SEQ ID NO: 144;
[0744] k) a VH region comprising a CDR-H1 depicted in SEQ ID NO: 153, a CDR-H2 depicted in SEQ ID NO: 154, and a CDR-H3 depicted in SEQ ID NO: 155, and a VL region comprising a CDR-L1 depicted in SEQ ID NO: 156, a CDR-L2 depicted in SEQ ID NO: 157 and a CDR-L3 depicted in SEQ ID NO: 158;
[0745] l) a VH region comprising a CDR-H1 depicted in SEQ ID NO: 167, a CDR-H2 depicted in SEQ ID NO: 168, and a CDR-H3 depicted in SEQ ID NO: 169, and a VL region comprising a CDR-L1 depicted in SEQ ID NO: 170, a CDR-L2 depicted in SEQ ID NO: 171 and a CDR-L3 depicted in SEQ ID NO: 172;
[0746] m) a VH region comprising a CDR-H1 depicted in SEQ ID NO: 181, a CDR-H2 depicted in SEQ ID NO: 182, and a CDR-H3 depicted in SEQ ID NO: 183, and a VL region comprising a CDR-L1 depicted in SEQ ID NO: 184, a CDR-L2 depicted in SEQ ID NO: 185 and a CDR-L3 depicted in SEQ ID NO: 186;
[0747] n) a VH region comprising a CDR-H1 depicted in SEQ ID NO: 195, a CDR-H2 depicted in SEQ ID NO: 196, and a CDR-H3 depicted in SEQ ID NO: 197, and a VL region comprising a CDR-L1 depicted in SEQ ID NO: 198, a CDR-L2 depicted in SEQ ID NO: 199 and a CDR-L3 depicted in SEQ ID NO: 200;
[0748] o) a VH region comprising a CDR-H1 depicted in SEQ ID NO: 209, a CDR-H2 depicted in SEQ ID NO: 210, and a CDR-H3 depicted in SEQ ID NO: 211, and a VL region comprising a CDR-L1 depicted in SEQ ID NO: 212, a CDR-L2 depicted in SEQ ID NO: 213 and a CDR-L3 depicted in SEQ ID NO: 214;
[0749] p) a VH region comprising a CDR-H1 depicted in SEQ ID NO: 223, a CDR-H2 depicted in SEQ ID NO: 224, and a CDR-H3 depicted in SEQ ID NO: 225, and a VL region comprising a CDR-L1 depicted in SEQ ID NO: 226, a CDR-L2 depicted in SEQ ID NO: 227 and a CDR-L3 depicted in SEQ ID NO: 228;
[0750] q) a VH region comprising a CDR-H1 depicted in SEQ ID NO: 237, a CDR-H2 depicted in SEQ ID NO: 238, and a CDR-H3 depicted in SEQ ID NO: 239, and a VL region comprising a CDR-L1 depicted in SEQ ID NO: 240, a CDR-L2 depicted in SEQ ID NO: 241 and a CDR-L3 depicted in SEQ ID NO: 242;
[0751] r) a VH region comprising a CDR-H1 depicted in SEQ ID NO: 251, a CDR-H2 depicted in SEQ ID NO: 252, and a CDR-H3 depicted in SEQ ID NO: 253, and a VL region comprising a CDR-L1 depicted in SEQ ID NO: 254, a CDR-L2 depicted in SEQ ID NO: 255 and a CDR-L3 as depicted in SEQ ID NO: 256,
[0752] s) a VH region comprising a CDR-H1 depicted in SEQ ID NO: 265, a CDR-H2 depicted in SEQ ID NO: 266, and a CDR-H3 depicted in SEQ ID NO: 267, and a VL region comprising a CDR-L1 depicted in SEQ ID NO: 268, a CDR-L2 depicted in SEQ ID NO: 269, and a CDR-L3 as depicted in SEQ ID NO: 270.
[0753] xiv) The polypeptide or polypeptide construct according to any one of the preceding items, wherein the domain comprising, or consisting of, a paratope binding to CLDN6 comprises a VH region having an amino acid sequence selected from the group comprising the sequences depicted in SEQ ID NO: 11, SEQ ID NO: 25, SEQ ID NO: 39, SEQ ID NO: 53, SEQ ID NO: 67, SEQ ID NO: 81, SEQ ID NO: 95, SEQ ID NO: 109, SEQ ID NO: 123, SEQ ID NO: 137, SEQ ID NO: 151, SEQ ID NO: 165, SEQ ID NO: 179, SEQ ID NO: 193, SEQ ID NO: 207, SEQ ID NO: 221, SEQ ID NO: 235, SEQ ID NO: 249, or SEQ ID NO: 263,
[0754] wherein said VH region amino acid sequence may have one or more modifications of one or several amino acid residues in the framework and/or hypervariable regions, provided said domain comprising said modified VH region selectively binds to CLDN6, and
[0755] optionally wherein said domain is part of a polypeptide or polypeptide construct that activates T cells and maintains the ability to induce T cell-dependent cytotoxicity,
[0756] further, optionally, wherein said domain is part of a polypeptide or polypeptide construct that activates T cells and maintains the ability to induce T cell-dependent cytotoxicity with more than 1000 fold efficacy than in an identical cell type which expresses CLDN9, but does not express CLDN6, and
[0757] still further optionally, wherein said domain is part of a polypeptide or polypeptide construct that is not capable of activating T cells and inducing T cell-dependent cytotoxicity in CLDN6-negative cells of the same cell type, preferably when tested in an in vitro cytotoxicity assay.
[0758] xv) The polypeptide or polypeptide construct according to any one of the preceding items, wherein the domain (comprising, or consisting of, a) paratope binding to CLDN6 comprises a VL region having an amino acid sequence selected from the group comprising the sequences depicted in SEQ ID NO: 12, SEQ ID NO: 26, SEQ ID NO: 40, SEQ ID NO: 54, SEQ ID NO: 68, SEQ ID NO: 82, SEQ ID NO: 96, SEQ ID NO: 110, SEQ ID NO: 124, SEQ ID NO: 138, SEQ ID NO: 152, SEQ ID NO: 166, SEQ ID NO: 180, SEQ ID NO: 194, SEQ ID NO: 208, SEQ ID NO: 222, SEQ ID NO: 236, SEQ ID NO: 250, or SEQ ID NO: 264,
[0759] wherein said VL region amino acid sequence may have one or more modifications of one or several amino acid residues in the framework and/or hypervariable regions, provided said domain comprising said modified VL region selectively binds to CLDN6, and
[0760] optionally wherein said domain is part of a polypeptide or polypeptide construct that activates T cells and maintains the ability to induce T cell-dependent cytotoxicity in target cells,
[0761] further, optionally, wherein said domain is part of a polypeptide or polypeptide construct that activates T cells and maintains the ability to induce T cell-dependent cytotoxicity with more than 500 fold efficacy than in control cells which do not express CLDN6, wherein these cells optionally express CLDN9, but
[0762] still further optionally, wherein said domain is part of a polypeptide or polypeptide construct that is not capable of activating T cells and inducing T cell-dependent cytotoxicity in CLDN6-negative cells of the same cell type, preferably when tested in a in vitro cytotoxicity assay.
[0763] xvi) The polypeptide or polypeptide construct according to any one of the preceding items, wherein the domain (comprising, or consisting of, a paratope) binding to CLDN6 comprises a pair of a VH region and a VL region having amino acid sequences as depicted in SEQ ID NOs: 11+12, SEQ ID NO: 25+26, SEQ ID NO: 39+40, SEQ ID NO: 53+54, SEQ ID NO: 67+68, SEQ ID NO: 81+82, SEQ ID NO: 95+96, SEQ ID NO: 109+110, SEQ ID NO: 123+124, SEQ ID NO: 137+138, SEQ ID NO: 151+152, SEQ ID NO: 165+166, SEQ ID NO: 179+180, SEQ ID NO: 193+194, SEQ ID NO: 207+208, SEQ ID NO: 221+222, SEQ ID NO: 235+236, SEQ ID NO: 249+250, or SEQ ID NO: 263+264.
[0764] xvii) The polypeptide or polypeptide construct according to any one of the preceding items, wherein the domain (comprising, or consisting of, a paratope) binding to CLDN6 comprises an amino acid sequence as depicted in SEQ ID NO: 19, SEQ ID NO: 22, SEQ ID NO: 33, SEQ ID NO: 36, SEQ ID NO: 47, SEQ ID NO: 50, SEQ ID NO: 61, SEQ ID NO: 64, SEQ ID NO: 75, SEQ ID NO: 78, SEQ ID NO: 89, SEQ ID NO: 92, SEQ ID NO: 103, SEQ ID NO: 106, SEQ ID NO: 117, SEQ ID NO: 120, SEQ ID NO: 131, SEQ ID NO: 134, SEQ ID NO: 145, SEQ ID NO: 148, SEQ ID NO: 159, SEQ ID NO: 162, SEQ ID NO: 173, SEQ ID NO: 176, SEQ ID NO: 187, SEQ ID NO: 190, SEQ ID NO: 201, SEQ ID NO: 204, SEQ ID NO: 215, SEQ ID NO: 218, SEQ ID NO: 229, SEQ ID NO: 232, SEQ ID NO: 243, SEQ ID NO: 246, SEQ ID NO: 257, or SEQ ID NO: 260, SEQ ID NO: 271 or SEQ ID NO: 274.
[0765] xviii) The polypeptide or polypeptide construct according to any one of the preceding items, comprising or consisting of a polypeptide having an amino acid sequence selected from the group of those depicted in SEQ ID NO: 19, SEQ ID NO: 20, SEQ ID NO: 21, SEQ ID NO: 22, SEQ ID NO: 23, and SEQ ID NO: 24, SEQ ID NO: 33, SEQ ID NO: 34, SEQ ID NO: 35, SEQ ID NO: 36, SEQ ID NO: 37, and SEQ ID NO: 38, SEQ ID NO: 47, SEQ ID NO: 48, SEQ ID NO: 49, SEQ ID NO: 50, SEQ ID NO: 51, and SEQ ID NO: 52, SEQ ID NO: 61, SEQ ID NO: 62, SEQ ID NO: 63, SEQ ID NO: 64, SEQ ID NO: 65, and SEQ ID NO: 66, SEQ ID NO: 75, SEQ ID NO: 76, SEQ ID NO: 77, SEQ ID NO: 78, SEQ ID NO: 79, and SEQ ID NO: 80, SEQ ID NO: 89, SEQ ID NO: 90, SEQ ID NO: 91, SEQ ID NO: 92, SEQ ID NO: 93, and SEQ ID NO: 94, SEQ ID NO: 103, SEQ ID NO: 104, SEQ ID NO: 105, SEQ ID NO: 106, SEQ ID NO: 107, and SEQ ID NO: 108, SEQ ID NO: 117, SEQ ID NO: 118, SEQ ID NO: 119, SEQ ID NO: 120, SEQ ID NO: 121, and SEQ ID NO: 122, SEQ ID NO: 131, SEQ ID NO: 132, SEQ ID NO: 133, SEQ ID NO: 134, SEQ ID NO: 135, and SEQ ID NO: 136, SEQ ID NO: 145, SEQ ID NO: 146, SEQ ID NO: 147, SEQ ID NO: 148, SEQ ID NO: 149, and SEQ ID NO: 150, SEQ ID NO: 159, SEQ ID NO: 160, SEQ ID NO: 161, SEQ ID NO: 162, SEQ ID NO: 163, and SEQ ID NO: 164, SEQ ID NO: 173, SEQ ID NO: 174, SEQ ID NO: 175, SEQ ID NO: 176, SEQ ID NO: 177, and SEQ ID NO: 178, SEQ ID NO: 187, SEQ ID NO: 188, SEQ ID NO: 189, SEQ ID NO: 190, SEQ ID NO: 191, and SEQ ID NO: 192, SEQ ID NO: 201, SEQ ID NO: 202, SEQ ID NO: 203, SEQ ID NO: 204, SEQ ID NO: 205, and SEQ ID NO: 206, SEQ ID NO: 215, SEQ ID NO: 216, SEQ ID NO: 217, SEQ ID NO: 218, SEQ ID NO: 219, and SEQ ID NO: 220, SEQ ID NO: 229, SEQ ID NO: 230, SEQ ID NO: 231, SEQ ID NO: 232, SEQ ID NO: 233, and SEQ ID NO: 234, SEQ ID NO: 243, SEQ ID NO: 244, SEQ ID NO: 245, SEQ ID NO: 246, SEQ ID NO: 247, and SEQ ID NO: 248, SEQ ID NO: 257, SEQ ID NO: 258, SEQ ID NO: 259, SEQ ID NO: 260, SEQ ID NO: 261, and SEQ ID NO: 262, SEQ ID NO: 271, SEQ ID NO: 272, SEQ ID NO: 273, SEQ ID NO: 274, SEQ ID NO: 275, and SEQ ID NO: 276, or from polypeptides/polypeptide constructs having an amino acid having at least 90, 91, 92, 93, 94, 95, 96, 97, 98 or 99% identity to said sequences.
[0766] xix) The polypeptide or polypeptide construct according to any one of the preceding items, wherein the domain comprising, or consisting of, a paratope binding to CLDN6 induces at least 100 fold, at least 250 fold, at least 500 fold lower cytotoxicity, or at least 1000 fold lower T cell-dependent cytotoxicity as determined in an in vitro assay using a cell that expresses a mutant of wild-type CLDN6 as depicted in SEQ ID NO: 1 that comprises at least one or more of the following mutations M29X, wherein X is preferably L, R145X, wherein X is preferably Q, and/or Q156X, wherein X is preferably L, as compared with the T cell-dependent cytotoxicity measured in the in vitro assay using a cell that expresses CLDN6 as depicted in SEQ ID NO: 1.
[0767] xx) The polypeptide or polypeptide construct according to any one of the preceding items, wherein the domain comprising, or consisting of, a paratope binding to CLDN6 induces at least 100 fold, at least 250 fold, at least 500 fold lower cytotoxicity, or at least 1000 fold lower T cell-dependent cytotoxicity as determined in an in vitro assay using a cell that expresses a mutant of wild-type CLDN6 as depicted in SEQ ID NO: 1 that comprises at least one or more of the following mutations M29X, wherein X is preferably L, R145X, wherein X is preferably Q, and/or Q156X, wherein X is preferably L, as compared with the T cell-dependent cytotoxicity measured in the in vitro assay using a cell that expresses CLDN6 as depicted in SEQ ID NO: 1, wherein said construct is capable of activating T cells and inducing T cell-dependent cytotoxicity in target cells expressing CLDN6, and wherein said construct has a heavy chain CDR3 sequence comprising: X1LIVX2APX3 (SEQ ID NO. 667), wherein X1 is either A or N; X2 is either V or E; and X3 is either V or A.
[0768] xxi) The polypeptide or polypeptide construct according to one of the preceding items, wherein the construct is a single chain construct.
[0769] xxii) The polypeptide or polypeptide construct according to one of the preceding items, wherein said half-life extending domain comprising, or consisting of, two polypeptide monomers comprises a hinge, a CH2 domain and a CH3 domain comprising in an amino to carboxyl order: hinge-CH2-CH3-linker-hinge-CH2-CH3.
[0770] xxiii) The polypeptide or polypeptide construct according to one of the preceding items, wherein the CH2 domain comprises an intra domain cysteine disulfide bridge.
[0771] xxiv) The polypeptide or polypeptide construct according to one of the preceding items, wherein
[0772] (a) the antigen-binding (epitope-binding) domain comprising the paratope binding CLDN6 comprises, or consists of, two antibody variable domains and the antigen-binding (epitope-binding) domain comprising the paratope binding CD3 comprises, or consists of, two antibody variable domains;
[0773] (b) the antigen-binding (epitope-binding) domain comprising the paratope binding CLDN6 comprises, or consists of, one antibody variable domain and the antigen-binding (epitope-binding) domain comprising the paratope binding CD3 comprises, or consists of, two antibody variable domains;
[0774] (c) the antigen-binding (epitope-binding) domain comprising the paratope binding CLDN6 comprises, or consists of, two antibody variable domains and the antigen-binding (epitope-binding) domain comprising the paratope binding CD3 comprises, or consists of, one antibody variable domain; or
[0775] (d) the antigen-binding (epitope-binding) domain comprising the paratope binding CLDN6 comprises, or consists of, one antibody variable domain and the antigen-binding (epitope-binding) domain comprising the paratope binding CD3 comprises, or consists of, one antibody variable domain.
[0776] xxv) The polypeptide or polypeptide construct according to one of the preceding items, wherein the antigen-binding (epitope-binding) comprising, or consisting of, the paratope binding CLDN6 and the antigen-binding (epitope-binding) domain comprising, or consisting of, the paratope binding CD3 are fused to another domain via a peptide linker.
[0777] xxvi) The polypeptide or polypeptide construct according to any one of the preceding items, wherein the polypeptide or polypeptide construct comprises, or consists of, in an amino to carboxyl order, or in a carboxyl to amino order:
[0778] (a) an antigen-binding (epitope-binding) domain (comprising a paratope) binding to CLDN6;
[0779] (b) a peptide linker preferably having an amino acid sequence selected from the group consisting of SEQ ID NOs: 563-575;
[0780] (c) an antigen-binding (epitope-binding) domain (comprising a paratope) binding to CD3.
[0781] xxvii) The polypeptide or polypeptide construct according to item xxvi), wherein the polypeptide or polypeptide construct further comprises in an amino to carboxyl order, or in a carboxyl to amino order, or between the antigen-binding (epitope-binding) domain comprising a paratope binding to CLDN6 and the antigen-binding (epitope-binding) domain (comprising a paratope) binding to CD3:
[0782] (a) a peptide linker having an amino acid sequence selected from the group consisting of SEQ ID NOs: 563-575;
[0783] (b) the first polypeptide monomer of a third domain;
[0784] (c) a peptide linker having an amino acid sequence selected from the group consisting of SEQ ID NOs: 563-575; and
[0785] (d) the second polypeptide monomer of said third domain.
[0786] xxviii) The polypeptide or polypeptide construct according to one of the preceding items, wherein the construct is depicted in any one of the sequences depicted in SEQ ID NO: 21, 24, 35, 38, 49, 52, 63, 66, 77, 80, 91, 94, 105, 108, 119, 122, 133, 136, 147, 150, 161, 164, 175, 178, 189, 192, 203, 206, 217, 220, 231, 234, 245, 148, 259, 262, 273, 276, 287, 290, 301, 304, 315, 318, 329, 332, 343, 346, 357, 360, 371, 374, 385, 388, 399, 402, 413, 416, 427, and 430, particularly, 21, 24, 35, 38, 49, 52, 63, 66, 77, 80, 91, 94, more particularly, 21, 24, 35, 38, 49, 52, 77, and 80, and even more particularly, 21, 35, 49, and 77.
[0787] xxix) The polypeptide or polypeptide construct according to one of the preceding items, wherein the construct comprises a domain (comprising a paratope) binding to CD3 comprising a VH domain comprising at least one, two, or all of the following CDR sequences as depicted in SEQ ID NO: 670, 671, and/or 672.
[0788] xxx) The polypeptide or polypeptide construct according to one of the preceding items, wherein the construct comprises a domain (comprising a paratope) binding to CD3 comprising a VL domain comprising at least one, two, or all of the following CDR sequences as depicted in SEQ ID NO: 673, 674, and/or 675.
[0789] xxxi) The polypeptide or polypeptide construct according to one of the preceding items, wherein the construct comprises a domain (comprising a paratope) binding to CD3 comprising a VH and a VL domain comprising at least one, two, or all of the following CDR sequences as depicted in SEQ ID NO: 670, 671, 672, 673, 674, and/or 675.
[0790] xxxii) The polypeptide or polypeptide construct according to one of the preceding items, wherein the construct comprises a domain (comprising a paratope) binding to CD3 comprising a VH domain as depicted in SEQ ID NO: 676.
[0791] xxxiii) The polypeptide construct according to one of the preceding items, wherein the construct comprises a domain (comprising a paratope) binding to CD3 comprising a VL domain as depicted in SEQ ID NO: 677.
[0792] xxxiv) The polypeptide or polypeptide construct according to one of the preceding items, wherein the construct comprises a domain (comprising a paratope) binding to CD3 comprising a VH domain as depicted in SEQ ID NO: 676 and a VL domain as depicted in SEQ ID NO: 677.
[0793] xxxv) The polypeptide or polypeptide construct according to one of the preceding items, wherein the construct comprises a domain (comprising a paratope) binding to CD3 comprising a scFv domain as depicted in SEQ ID NO: 678.
[0794] xxxvi) A polynucleotide encoding a polypeptide or polypeptide construct as defined in any one of the preceding items.
[0795] xxxvii) A vector comprising a polynucleotide as defined in item xxxvi).
[0796] xxxviii)A host cell transformed or transfected with the polynucleotide as defined in item xxxvi) or with the vector as defined in item xxxvii).
[0797] xil) A process for producing a polypeptide or polypeptide construct as defined in any one of items i) to xxxv), said process comprising culturing a host cell as defined in item xxxviii) under conditions allowing the expression of said polypeptide construct and recovering the produced polypeptide or polypeptide construct from the culture.
[0798] xl) A pharmaceutical composition comprising a polypeptide or polypeptide construct as defined in any one of items i) to xxxv), or that is produced according to the process of item xxxix).
[0799] xli) The polypeptide or polypeptide construct according to any one of items i) to xxxv) or that is produced according to the process of item xxxix) for the use as a medicament, particularly for the use in the prevention, treatment or amelioration of a disease, preferably a neoplasm.
[0800] xlii) The polypeptide or polypeptide construct according to item xli) for the use as a medicament, particularly for the use in the prevention, treatment or amelioration of a disease, wherein the disease or neoplasm is selected from the group consisting of germ cell cancer, particularly ovarian cancer, in particular ovarian adenocarcinoma and ovarian teratocarcinoma, uterine cancer, and lung cancer, including small cell lung cancer (SCLC) and non-small cell lung cancer (NSCLC), in particular squamous cell lung carcinoma and adenocarcinoma.
[0801] xliii) The polypeptide or polypeptide construct according to item xli), wherein the lung cancer is non-small cell lung cancer (NSCLC), in particular squamous cell lung carcinoma and adenocarcinoma.
[0802] xliv) A kit comprising a polypeptide or polypeptide construct as defined in any one of items i) to xxxv), a polypeptide or polypeptide construct produced according to the process of item xil), a polynucleotide as defined in item xxxvi), a vector as defined in item xxxvii), and/or a host cell as defined in item xxxviii).
[0803] xlv) A method for the treatment or amelioration of a proliferative disease, a tumorous disease, cancer, or an immunological disorder, comprising the step of administering to a subject in need thereof the polypeptide or polypeptide construct according to any one of items i) to xxxv), or produced according to the process of item xil), wherein the disease preferably is selected from the group consisting of germ cell cancer, ovarian cancer, in particular ovarian adenocarcinoma and ovarian teratocarcinoma, uterine cancer, more particularly from ovarian serous cystadenocarcinoma, uterine carcinosarcoma, uterine corpus endometrial carcinoma, and lung cancer, including small cell lung cancer (SCLC) and non-small cell lung cancer (NSCLC), in particular squamous cell lung carcinoma and adenocarcinoma.
[0804] xlvi) A polypeptide or a polypeptide construct comprising
   [0805] a domain which binds to human CLDN6 (SEQ ID NO: 1), and
   [0806] a domain which binds to human CD3, and
   [0807] a domain extending the half-life of the polypeptide.
[0808] xlvii) The polypeptide or polypeptide construct according to item xlvi), wherein said polypeptide construct is a T-cell activating construct.
[0809] xlviii) The polypeptide or polypeptide construct according to any one of item xlvi) and xlvii), wherein said polypeptide construct is a T-cell activating polypeptide as determined in a T cell activation assay selected from the group comprising determining the expression quantity of CD69, determining the expression quantity of CD25, determining the quantity of secreted IL-2, and determining the cytolytic activity of the T cells.
[0810] xlix) The polypeptide or polypeptide construct according to any one of item xlvi) to xlviii), wherein the domain which extends the half-life of the polypeptide comprises two polypeptide monomers, each comprising a hinge, a CH2 domain and a CH3 domain.
[0811] xlx) The polypeptide or polypeptide construct according to any one of item xlvi) and xlix), wherein the antigen-binding domain binding CLDN6 binds to an epitope within human CLDN6 which corresponds to amino acids 29-81 of SEQ ID NO. 1 (UniProt entry P56747).
[0812] xlxi) The polypeptide or polypeptide construct according to any one of item xlvi) and xlx), wherein the first antigen-binding domain binding CLDN6 binds to an epitope within human CLDN6 which corresponds to amino acids 138-160 of SEQ ID NO. 1 (UniProt entry P56747).
[0813] xlxii) The polypeptide or polypeptide construct according to any one of item xlvi) and xlxi), wherein said domain binds to CLDN6 amino acids 29-39 of SEQ ID NO: 1 in the extracellular loop 1 (ECL1) of CLDN6 which is depicted in SEQ ID NO: 9 and/or by amino acids 151-160 of SEQ ID NO: 1 in the extracellular loop 2 (ECL2) of CLDN6 as depicted in SEQ ID NO: 10.
[0814] xlxiii) The polypeptide or polypeptide construct according to any one of item xlvi) and xlxii), wherein said domain binding to CD3 binds to an extracellular epitope of the human and the Macaca CD3ε chain.
[0815] xlxiv) The polypeptide or polypeptide construct according to any one of item xlvi) and xlxiii), wherein the domain that binds to CLDN6 binds to the same epitope on CLDN6 as a polypeptide construct or an antibody or derivative or fragment thereof that comprise a domain binding to CLDN6, wherein the domain comprises complementarity determining regions CDR-H1, CDR-H2, and CDR-H3 of a variable heavy (VH) chain and/or complementarity determining regions CDR-L1, CDR-L2, and CDR-L3 of a variable light (VL) chain selected from the groups depicted in a) to s) below, a) to d), n) and s) being preferred, a) to c), e) and s) being very preferred):
[0816] a) a VH region comprising a CDR-H1 depicted in SEQ ID NO: 13, a CDR-H2 depicted in SEQ ID NO: 14, and a CDR-H3 depicted in SEQ ID NO: 15, and a VL region comprising a CDR-L1 depicted in SEQ ID NO: 16, a CDR-L2 depicted in SEQ ID NO: 17 and a CDR-L3 depicted in SEQ ID NO: 18;
[0817] b) a VH region comprising a CDR-H1 depicted in SEQ ID NO: 27, a CDR-H2 depicted in SEQ ID NO: 28, and a CDR-H3 depicted in SEQ ID NO: 29, and a VL region comprising a CDR-L1 depicted in SEQ ID NO: 30, a CDR-L2 depicted in SEQ ID NO: 31 and a CDR-L3 depicted in SEQ ID NO: 32;
[0818] c) a VH region comprising a CDR-H1 depicted in SEQ ID NO: 41, a CDR-H2 depicted in SEQ ID NO: 42, and a CDR-H3 depicted in SEQ ID NO: 43, and a VL region comprising a CDR-L1 depicted in SEQ ID NO: 44, a CDR-L2 depicted in SEQ ID NO: 45 and a CDR-L3 depicted in SEQ ID NO: 46;
[0819] d) a VH region comprising a CDR-H1 depicted in SEQ ID NO: 55, a CDR-H2 depicted in SEQ ID NO: 56, and a CDR-H3 depicted in SEQ ID NO: 57, and a VL region comprising a CDR-L1 depicted in SEQ ID NO: 58, a CDR-L2 depicted in SEQ ID NO: 59 and a CDR-L3 depicted in SEQ ID NO: 60;
[0820] e) a VH region comprising a CDR-H1 depicted in SEQ ID NO: 69, a CDR-H2 depicted in SEQ ID NO: 70, and a CDR-H3 depicted in SEQ ID NO: 71, and a VL region comprising a CDR-L1 depicted in SEQ ID NO: 72, a CDR-L2 depicted in SEQ ID NO: 73 and a CDR-L3 depicted in SEQ ID NO: 74;
[0821] f) a VH region comprising a CDR-H1 depicted in SEQ ID NO: 83, a CDR-H2 depicted in SEQ ID NO: 84, and a CDR-H3 depicted in SEQ ID NO: 85, and a VL region comprising a CDR-L1 depicted in SEQ ID NO: 86, a CDR-L2 depicted in SEQ ID NO: 87 and a CDR-L3 depicted in SEQ ID NO: 88;
[0822] g) a VH region comprising a CDR-H1 depicted in SEQ ID NO: 97, a CDR-H2 depicted in SEQ ID NO: 98, and a CDR-H3 depicted in SEQ ID NO: 99, and a VL region comprising a CDR-L1 depicted in SEQ ID NO: 100, a CDR-L2 depicted in SEQ ID NO: 101 and a CDR-L3 depicted in SEQ ID NO: 102;
[0823] h) a VH region comprising a CDR-H1 depicted in SEQ ID NO: 111, a CDR-H2 depicted in SEQ ID NO: 112, and a CDR-H3 depicted in SEQ ID NO: 113, and a VL region comprising a CDR-L1 depicted in SEQ ID NO: 114, a CDR-L2 depicted in SEQ ID NO: 115 and a CDR-L3 depicted in SEQ ID NO: 116;
[0824] i) a VH region comprising a CDR-H1 depicted in SEQ ID NO: 125, a CDR-H2 depicted in SEQ ID NO: 126, and a CDR-H3 depicted in SEQ ID NO: 127, and a VL region comprising a CDR-L1 depicted in SEQ ID NO: 128, a CDR-L2 depicted in SEQ ID NO: 129 and a CDR-L3 depicted in SEQ ID NO: 130;
[0825] j) a VH region comprising a CDR-H1 depicted in SEQ ID NO: 139, a CDR-H2 depicted in SEQ ID NO: 140, and a CDR-H3 depicted in SEQ ID NO: 141, and a VL region comprising a CDR-L1 depicted in SEQ ID NO: 142, a CDR-L2 depicted in SEQ ID NO: 143 and a CDR-L3 depicted in SEQ ID NO: 144;
[0826] k) a VH region comprising a CDR-H1 depicted in SEQ ID NO: 153, a CDR-H2 depicted in SEQ ID NO: 154, and a CDR-H3 depicted in SEQ ID NO: 155, and a VL region comprising a CDR-L1 depicted in SEQ ID NO: 156, a CDR-L2 depicted in SEQ ID NO: 157 and a CDR-L3 depicted in SEQ ID NO: 158;
[0827] l) a VH region comprising a CDR-H1 depicted in SEQ ID NO: 167, a CDR-H2 depicted in SEQ ID NO: 168, and a CDR-H3 depicted in SEQ ID NO: 169, and a VL region comprising a CDR-L1 depicted in SEQ ID NO: 170, a CDR-L2 depicted in SEQ ID NO: 171 and a CDR-L3 depicted in SEQ ID NO: 172;
[0828] m) a VH region comprising a CDR-H1 depicted in SEQ ID NO: 181, a CDR-H2 depicted in SEQ ID NO: 182, and a CDR-H3 depicted in SEQ ID NO: 183, and a VL region comprising a CDR-L1 depicted in SEQ ID NO: 184, a CDR-L2 depicted in SEQ ID NO: 185 and a CDR-L3 depicted in SEQ ID NO: 186;
[0829] n) a VH region comprising a CDR-H1 depicted in SEQ ID NO: 195, a CDR-H2 depicted in SEQ ID NO: 196, and a CDR-H3 depicted in SEQ ID NO: 197, and a VL region comprising a CDR-L1 depicted in SEQ ID NO: 198, a CDR-L2 depicted in SEQ ID NO: 199 and a CDR-L3 depicted in SEQ ID NO: 200;
[0830] o) a VH region comprising a CDR-H1 depicted in SEQ ID NO: 209, a CDR-H2 depicted in SEQ ID NO: 210, and a CDR-H3 depicted in SEQ ID NO: 211, and a VL region comprising a CDR-L1 depicted in SEQ ID NO: 212, a CDR-L2 depicted in SEQ ID NO: 213 and a CDR-L3 depicted in SEQ ID NO: 214;
[0831] p) a VH region comprising a CDR-H1 depicted in SEQ ID NO: 223, a CDR-H2 depicted in SEQ ID NO: 224, and a CDR-H3 depicted in SEQ ID NO: 225, and a VL region comprising a CDR-L1 depicted in SEQ ID NO: 226, a CDR-L2 depicted in SEQ ID NO: 227 and a CDR-L3 depicted in SEQ ID NO: 228;
[0832] q) a VH region comprising a CDR-H1 depicted in SEQ ID NO: 237, a CDR-H2 depicted in SEQ ID NO: 238, and a CDR-H3 depicted in SEQ ID NO: 239, and a VL region comprising a CDR-L1 depicted in SEQ ID NO: 240, a CDR-L2 depicted in SEQ ID NO: 241 and a CDR-L3 depicted in SEQ ID NO: 242;
[0833] r) a VH region comprising a CDR-H1 depicted in SEQ ID NO: 251, a CDR-H2 depicted in SEQ ID NO: 252, and a CDR-H3 depicted in SEQ ID NO: 253, and a VL region comprising a CDR-L1 depicted in SEQ ID NO: 254, a CDR-L2 depicted in SEQ ID NO: 255 and a CDR-L3 as depicted in SEQ ID NO: 256,
[0834] s) a VH region comprising a CDR-H1 depicted in SEQ ID NO: 265, a CDR-H2 depicted in SEQ ID NO: 266, and a CDR-H3 depicted in SEQ ID NO: 267, and a VL region comprising a CDR-L1 depicted in SEQ ID NO: 268, a CDR-L2 depicted in SEQ ID NO: 269, and a CDR-L3 as depicted in SEQ ID NO: 270.
[0835] xlxv) The polypeptide or polypeptide construct according to any one of item xlvi) and xlxiv), wherein the domain binding to human CD3 epsilon also binds to Callithrix jacchus or Saimiri sciureus CD3 epsilon.
[0836] xlxvi) The polypeptide or polypeptide construct according to any one of item xlvi) and xlxv), wherein
   [0837] a) the polypeptide is a single chain construct,
   [0838] b) the domain binding to CLDN6 is in the format of an scFv,
   [0839] c) the domain binding to CD3 is in the format of an scFv,
   [0840] d) the domains are connected via a linker, and/or
   [0841] e) the polypeptide or polypeptide construct comprises a domain providing an extended serum half-life.
[0842] xlxvii) The polypeptide or polypeptide construct according to any one of item xlvi) and xlxvi), wherein the domain binding to CLDN6 does not bind to CLDN1, CLDN2, CLDN3, CLDN4, CLDN9, and/or CLDN18.1/CLDN18.2.
[0843] xlxviii) The polypeptide or polypeptide construct according to any one of item xlvi) and xlxvii), wherein the domain binding to CLDN6 comprises a VH region comprising a CDR-H1, a CDR-H2 and a CDR-H3 and a VL region comprising a CDR-L1, a CDR-L2 and a CDR-L3 selected from the groups depicted in in a) to s) below, a) to d), n) and s) being preferred, a) to c), e) and s) being very preferred:
   [0844] a) a VH region comprising a CDR-H1 depicted in SEQ ID NO: 13, a CDR-H2 depicted in SEQ ID NO: 14, and a CDR-H3 depicted in SEQ ID NO: 15, and a VL region comprising a CDR-L1 depicted in SEQ ID NO: 16, a CDR-L2 depicted in SEQ ID NO: 17 and a CDR-L3 depicted in SEQ ID NO: 18;
   [0845] b) a VH region comprising a CDR-H1 depicted in SEQ ID NO: 27, a CDR-H2 depicted in SEQ ID NO: 28, and a CDR-H3 depicted in SEQ ID NO: 29, and a VL region comprising a CDR-L1 depicted in SEQ ID NO: 30, a CDR-L2 depicted in SEQ ID NO: 31 and a CDR-L3 depicted in SEQ ID NO: 32;
   [0846] c) a VH region comprising a CDR-H1 depicted in SEQ ID NO: 41, a CDR-H2 depicted in SEQ ID NO: 42, and a CDR-H3 depicted in SEQ ID NO: 43, and a VL region comprising a CDR-L1 depicted in SEQ ID NO: 44, a CDR-L2 depicted in SEQ ID NO: 45 and a CDR-L3 depicted in SEQ ID NO: 46;
   [0847] d) a VH region comprising a CDR-H1 depicted in SEQ ID NO: 55, a CDR-H2 depicted in SEQ ID NO: 56, and a CDR-H3 depicted in SEQ ID NO: 57, and a VL region comprising a CDR-L1 depicted in SEQ ID NO: 58, a CDR-L2 depicted in SEQ ID NO: 59 and a CDR-L3 depicted in SEQ ID NO: 60;
   [0848] e) a VH region comprising a CDR-H1 depicted in SEQ ID NO: 69, a CDR-H2 depicted in SEQ ID NO: 70, and a CDR-H3 depicted in SEQ ID NO: 71, and a VL region comprising a CDR-L1 depicted in SEQ ID NO: 72, a CDR-L2 depicted in SEQ ID NO: 73 and a CDR-L3 depicted in SEQ ID NO: 74;
   [0849] f) a VH region comprising a CDR-H1 depicted in SEQ ID NO: 83, a CDR-H2 depicted in SEQ ID NO: 84, and a CDR-H3 depicted in SEQ ID NO: 85, and a VL region comprising a CDR-L1 depicted in SEQ ID NO: 86, a CDR-L2 depicted in SEQ ID NO: 87 and a CDR-L3 depicted in SEQ ID NO: 88;
   [0850] g) a VH region comprising a CDR-H1 depicted in SEQ ID NO: 97, a CDR-H2 depicted in SEQ ID NO: 98, and a CDR-H3 depicted in SEQ ID NO: 99, and a VL region comprising a CDR-L1 depicted in SEQ ID NO: 100, a CDR-L2 depicted in SEQ ID NO: 101 and a CDR-L3 depicted in SEQ ID NO: 102;
   [0851] h) a VH region comprising a CDR-H1 depicted in SEQ ID NO: 111, a CDR-H2 depicted in SEQ ID NO: 112, and a CDR-H3 depicted in SEQ ID NO: 113, and a VL region comprising a CDR-L1 depicted in SEQ ID NO: 114, a CDR-L2 depicted in SEQ ID NO: 115 and a CDR-L3 depicted in SEQ ID NO: 116;
   [0852] i) a VH region comprising a CDR-H1 depicted in SEQ ID NO: 125, a CDR-H2 depicted in SEQ ID NO: 126, and a CDR-H3 depicted in SEQ ID NO: 127, and a VL region comprising a CDR-L1 depicted in SEQ ID NO: 128, a CDR-L2 depicted in SEQ ID NO: 129 and a CDR-L3 depicted in SEQ ID NO: 130;
   [0853] j) a VH region comprising a CDR-H1 depicted in SEQ ID NO: 139, a CDR-H2 depicted in SEQ ID NO: 140, and a CDR-H3 depicted in SEQ ID NO: 141, and a VL region comprising a CDR-L1 depicted in SEQ ID NO: 142, a CDR-L2 depicted in SEQ ID NO: 143 and a CDR-L3 depicted in SEQ ID NO: 144;
   [0854] k) a VH region comprising a CDR-H1 depicted in SEQ ID NO: 153, a CDR-H2 depicted in SEQ ID NO: 154, and a CDR-H3 depicted in SEQ ID NO: 155, and a VL region comprising a CDR-L1 depicted in SEQ ID NO: 156, a CDR-L2 depicted in SEQ ID NO: 157 and a CDR-L3 depicted in SEQ ID NO: 158;
   [0855] l) a VH region comprising a CDR-H1 depicted in SEQ ID NO: 167, a CDR-H2 depicted in SEQ ID NO: 168, and a CDR-H3 depicted in SEQ ID NO: 169, and a VL region comprising a CDR-L1 depicted in SEQ ID NO: 170, a CDR-L2 depicted in SEQ ID NO: 171 and a CDR-L3 depicted in SEQ ID NO: 172;
   [0856] m) a VH region comprising a CDR-H1 depicted in SEQ ID NO: 181, a CDR-H2 depicted in SEQ ID NO: 182, and a CDR-H3 depicted in SEQ ID NO: 183, and a VL region comprising a CDR-L1 depicted in SEQ ID NO: 184, a CDR-L2 depicted in SEQ ID NO: 185 and a CDR-L3 depicted in SEQ ID NO: 186;
   [0857] n) a VH region comprising a CDR-H1 depicted in SEQ ID NO: 195, a CDR-H2 depicted in SEQ ID NO: 196, and a CDR-H3 depicted in SEQ ID NO: 197, and a VL region comprising a CDR-L1 depicted in SEQ ID NO: 198, a CDR-L2 depicted in SEQ ID NO: 199 and a CDR-L3 depicted in SEQ ID NO: 200;
   [0858] o) a VH region comprising a CDR-H1 depicted in SEQ ID NO: 209, a CDR-H2 depicted in SEQ ID NO: 210, and a CDR-H3 depicted in SEQ ID NO: 211, and a VL region comprising a CDR-L1 depicted in SEQ ID NO: 212, a CDR-L2 depicted in SEQ ID NO: 213 and a CDR-L3 depicted in SEQ ID NO: 214;
   [0859] p) a VH region comprising a CDR-H1 depicted in SEQ ID NO: 223, a CDR-H2 depicted in SEQ ID NO: 224, and a CDR-H3 depicted in SEQ ID NO: 225, and a VL region comprising a CDR-L1 depicted in SEQ ID NO: 226, a CDR-L2 depicted in SEQ ID NO: 227 and a CDR-L3 depicted in SEQ ID NO: 228;
   [0860] q) a VH region comprising a CDR-H1 depicted in SEQ ID NO: 237, a CDR-H2 depicted in SEQ ID NO: 238, and a CDR-H3 depicted in SEQ ID NO: 239, and a VL region comprising a CDR-L1 depicted in SEQ ID NO: 240, a CDR-L2 depicted in SEQ ID NO: 241 and a CDR-L3 depicted in SEQ ID NO: 242;
   [0861] r) a VH region comprising a CDR-H1 depicted in SEQ ID NO: 251, a CDR-H2 depicted in SEQ ID NO: 252, and a CDR-H3 depicted in SEQ ID NO: 253, and a VL region comprising a CDR-L1 depicted in SEQ ID NO: 254, a CDR-L2 depicted in SEQ ID NO: 255 and a CDR-L3 as depicted in SEQ ID NO: 256,
   [0862] s) a VH region comprising a CDR-H1 depicted in SEQ ID NO: 265, a CDR-H2 depicted in SEQ ID NO: 266, and a CDR-H3 depicted in SEQ ID NO: 267, and a VL region comprising a CDR-L1 depicted in SEQ ID NO: 268, a CDR-L2 depicted in SEQ ID NO: 269, and a CDR-L3 as depicted in SEQ ID NO: 270.
[0863] xlxix) The polypeptide or polypeptide construct according to any one of the preceding items, wherein the domain binding to CLDN6 comprises a VH region having an amino acid sequence selected from the group comprising the sequences depicted in SEQ ID NO: 11, SEQ ID NO: 25, SEQ ID NO: 39, SEQ ID NO: 53, SEQ ID NO: 67, SEQ ID NO: 81, SEQ ID NO: 95, SEQ ID NO: 109, SEQ ID NO: 123, SEQ ID NO: 137, SEQ ID NO: 151, SEQ ID NO: 165, SEQ ID NO: 179, SEQ ID NO: 193, SEQ ID NO: 207, SEQ ID NO: 221, SEQ ID NO: 235, SEQ ID NO: 249, or SEQ ID NO: 263,
   [0864] wherein said VH region amino acid sequence may have one or more modifications of one or several amino acid residues in the framework and/or hypervariable regions, provided said domain comprising said modified VH region selectively binds to CLDN6, and
   [0865] optionally wherein said domain is part of a polypeptide or polypeptide construct that activates T cells and maintains the ability to induce T cell-dependent cytotoxicity,
   [0866] further, optionally, wherein said domain is part of a polypeptide or polypeptide construct that activates T cells and maintains the ability to induce T cell-dependent cytotoxicity with more than 1000 fold efficacy than in an identical cell type which expresses CLDN9, but does not express CLDN6, and
   [0867] still further optionally, wherein said domain is part of a polypeptide or polypeptide construct that is not capable of activating T cells and inducing T cell-dependent cytotoxicity in CLDN6-negative cells of the same cell type, preferably when tested in an in vitro cytotoxicity assay.
[0868] xlxix) The polypeptide or polypeptide construct according to any one of the preceding items, wherein the domain binding to CLDN6 comprises a VL region having an amino acid sequence selected from the group comprising the sequences depicted in SEQ ID NO: 12, SEQ ID NO: 26, SEQ ID NO: 40, SEQ ID NO: 54, SEQ ID NO: 68, SEQ ID NO: 82, SEQ ID NO: 96, SEQ ID NO: 110, SEQ ID NO: 124, SEQ ID NO: 138, SEQ ID NO: 152, SEQ ID NO: 166, SEQ ID NO: 180, SEQ ID NO: 194, SEQ ID NO: 208, SEQ ID NO: 222, SEQ ID NO: 236, SEQ ID NO: 250, or SEQ ID NO: 264,
   [0869] wherein said VL region amino acid sequence may have one or more modifications of one or several amino acid residues in the framework and/or hypervariable regions, provided said domain comprising said modified VL region selectively binds to CLDN6, and
   [0870] optionally wherein said domain is part of a polypeptide or polypeptide construct that activates T cells and maintains the ability to induce T cell-dependent cytotoxicity in target cells,
   [0871] further, optionally, wherein said domain is part of a polypeptide or polypeptide construct that activates T cells and maintains the ability to induce T cell-dependent cytotoxicity with more than 500 fold efficacy than in control cells which do not express CLDN6, wherein these cells optionally express CLDN9, but
   [0872] still further optionally, wherein said domain is part of a polypeptide or polypeptide construct that is not capable of activating T cells and inducing T cell-dependent cytotoxicity in CLDN6-negative cells of the same cell type, preferably when tested in a in vitro cytotoxicity assay.
[0873] xlxx) The polypeptide or polypeptide construct according to any one of the preceding items, wherein the domain binding to CLDN6 comprises a pair of a VH region and a VL region having amino acid sequences as depicted in SEQ ID NOs: 11+12, SEQ ID NO: 25+26, SEQ ID NO: 39+40, SEQ ID NO: 53+54, SEQ ID NO: 67+68, SEQ ID NO: 81+82, SEQ ID NO: 95+96, SEQ ID NO: 109+110, SEQ ID NO: 123+124, SEQ ID NO: 137+138, SEQ ID NO: 151+152, SEQ ID NO: 165+166, SEQ ID NO: 179+180, SEQ ID NO: 193+194, SEQ ID NO: 207+208, SEQ ID NO: 221+222, SEQ ID NO: 235+236, SEQ ID NO: 249+250, or SEQ ID NO: 263+264.
[0874] xlxxi) The polypeptide or polypeptide construct according to any one of the preceding items, wherein the domain binding to CLDN6 comprises an amino acid sequence as depicted in SEQ ID NO: 19, SEQ ID NO: 22, SEQ ID NO: 33, SEQ ID NO: 36, SEQ ID NO: 47, SEQ ID NO: 50, SEQ ID NO: 61, SEQ ID NO: 64, SEQ ID NO: 75, SEQ ID NO: 78, SEQ ID NO: 89, SEQ ID NO: 92, SEQ ID NO: 103, SEQ ID NO: 106, SEQ ID NO: 117, SEQ ID NO: 120, SEQ ID NO: 131, SEQ ID NO: 134, SEQ ID NO: 145, SEQ ID NO: 148, SEQ ID NO: 159, SEQ ID NO: 162, SEQ ID NO: 173, SEQ ID NO: 176, SEQ ID NO: 187, SEQ ID NO: 190, SEQ ID NO: 201, SEQ ID NO: 204, SEQ ID NO: 215, SEQ ID NO: 218, SEQ ID NO: 229, SEQ ID NO: 232, SEQ ID NO: 243, SEQ ID NO: 246, SEQ ID NO: 257, or SEQ ID NO: 260, SEQ ID NO: 271 or SEQ ID NO: 274.
[0875] xlxxii) The polypeptide or polypeptide construct according to any one of the preceding items, comprising a polypeptide having an amino acid sequence selected from the group of those depicted in SEQ ID NO: 19, SEQ ID NO: 20, SEQ ID NO: 21, SEQ ID NO: 22, SEQ ID NO: 23, and SEQ ID NO: 24, SEQ ID NO: 33, SEQ ID NO: 34, SEQ ID NO: 35, SEQ ID NO: 36, SEQ ID NO: 37, and SEQ ID NO: 38, SEQ ID NO: 47, SEQ ID NO: 48, SEQ ID NO: 49, SEQ ID NO: 50, SEQ ID NO: 51, and SEQ ID NO: 52, SEQ ID NO: 61, SEQ ID NO: 62, SEQ ID NO: 63, SEQ ID NO: 64, SEQ ID NO: 65, and SEQ ID NO: 66, SEQ ID NO: 75, SEQ ID NO: 76, SEQ ID NO: 77, SEQ ID NO: 78, SEQ ID NO: 79, and SEQ ID NO: 80, SEQ ID NO: 89, SEQ ID NO: 90, SEQ ID NO: 91, SEQ ID NO: 92, SEQ ID NO: 93, and SEQ ID NO: 94, SEQ ID NO: 103, SEQ ID NO: 104, SEQ ID NO: 105, SEQ ID NO: 106, SEQ ID NO: 107, and SEQ ID NO: 108, SEQ ID NO: 117, SEQ ID NO: 118, SEQ ID NO: 119, SEQ ID NO: 120, SEQ ID NO: 121, and SEQ ID NO: 122, SEQ ID NO: 131, SEQ ID NO: 132, SEQ ID NO: 133, SEQ ID NO: 134, SEQ ID NO: 135, and SEQ ID NO: 136, SEQ ID NO: 145, SEQ ID NO: 146, SEQ ID NO: 147, SEQ ID NO: 148, SEQ ID NO: 149, and SEQ ID NO: 150, SEQ ID NO: 159, SEQ ID NO: 160, SEQ ID NO: 161, SEQ ID NO: 162, SEQ ID NO: 163, and SEQ ID NO: 164, SEQ ID NO: 173, SEQ ID NO: 174, SEQ ID NO: 175, SEQ ID NO: 176, SEQ ID NO: 177, and SEQ ID NO: 178, SEQ ID NO: 187, SEQ ID NO: 188, SEQ ID NO: 189, SEQ ID NO: 190, SEQ ID NO: 191, and SEQ ID NO: 192, SEQ ID NO: 201, SEQ ID NO: 202, SEQ ID NO: 203, SEQ ID NO: 204, SEQ ID NO: 205, and SEQ ID NO: 206, SEQ ID NO: 215, SEQ ID NO: 216, SEQ ID NO: 217, SEQ ID NO: 218, SEQ ID NO: 219, and SEQ ID NO: 220, SEQ ID NO: 229, SEQ ID NO: 230, SEQ ID NO: 231, SEQ ID NO: 232, SEQ ID NO: 233, and SEQ ID NO: 234, SEQ ID NO: 243, SEQ ID NO: 244, SEQ ID NO: 245, SEQ ID NO: 246, SEQ ID NO: 247, and SEQ ID NO: 248, SEQ ID NO: 257, SEQ ID NO: 258, SEQ ID NO: 259, SEQ ID NO: 260, SEQ ID NO: 261, and SEQ ID NO: 262, SEQ ID NO: 271, SEQ ID NO: 272, SEQ ID NO: 273, SEQ ID NO: 274, SEQ ID NO: 275, and SEQ ID NO: 276, or from polypeptides/polypeptide constructs having an amino acid having at least 90, 91, 92, 93, 94, 95, 96, 97, 98 or 99% identity to said sequences.
[0876] xlxxiii) The polypeptide or polypeptide construct according to any one of the preceding items, wherein the domain binding to CLDN6 induces at least 100 fold, at least 250 fold, at least 500 fold lower cytotoxicity as determined in an in vitro assay using a cell that expresses a mutant of wild-type CLDN6 as depicted in SEQ ID NO: 1 that comprises at least one or more of the following mutations M29X, wherein X is preferably L, R145X, wherein X is preferably Q, and/or Q156X, wherein X is preferably L, as compared with the cytotoxicity measured in the in vitro assay using a cell that expresses CLDN6 as depicted in SEQ ID NO: 1.
[0877] xlxxiv) The polypeptide or polypeptide construct according to any one of the preceding items, wherein the domain binding to CLDN6 induces at least 100 fold, at least 250 fold, at least 500 fold lower cytotoxicity as determined in an in vitro assay using a cell that expresses a mutant of wild-type CLDN6 as depicted in SEQ ID NO: 1 that comprises at least one or more of the following mutations M29X, wherein X is preferably L, R145X, wherein X is preferably Q, and/or Q156X, wherein X is preferably L, as compared with the cytotoxicity measured in the in vitro assay using a cell that expresses CLDN6 as depicted in SEQ ID NO: 1, wherein said construct is capable of activating T cells and inducing cytotoxicity in target cells expressing CLDN6, and wherein said construct has a heavy chain CDR3 sequence comprising: X1LIVX2APX3 (SEQ ID NO. 667), wherein X1 is either A or N; X2 is either V or E; and X3 is either V or A.
[0878] xlxxv) The polypeptide or polypeptide construct according to any one of the preceding items, wherein the construct is a single chain construct.
[0879] xlxxvi) The polypeptide or polypeptide construct according to any one of the preceding items, wherein said half-life extending domain comprising two polypeptide monomers comprises a hinge, a CH2 domain and a CH3 domain comprising in an amino to carboxyl order:
   [0880] hinge-CH2-CH3-linker-hinge-CH2-CH3.
[0881] xlxxvii) The polypeptide or polypeptide construct according to any one of the preceding items, wherein the CH2 domain comprises an intra domain cysteine disulfide bridge.
[0882] xlxxviii) The polypeptide or polypeptide construct according to any one of the preceding items, wherein
   [0883] (i) the antigen-binding (epitope-binding) domain binding CLDN6 comprises two antibody variable domains and the antigen-binding (epitope-binding) domain binding CD3 comprises two antibody variable domains;
   [0884] (ii) the antigen-binding (epitope-binding) domain binding CLDN6 comprises one antibody variable domain and the antigen-binding (epitope-binding) domain binding CD3 comprises two antibody variable domains;
   [0885] (iii) the antigen-binding (epitope-binding) domain binding CLDN6 comprises two antibody variable domains and the antigen-binding (epitope-binding) domain binding CD3 comprises one antibody variable domain; or
   [0886] (iv) the antigen-binding (epitope-binding) domain binding CLDN6 comprises one antibody variable domain and the antigen-binding (epitope-binding) domain binding CD3 comprises one antibody variable domain.
[0887] xlxxix) The polypeptide or polypeptide construct according to any one of the preceding items, wherein the antigen-binding (epitope-binding) binding CLDN6 and the antigen-binding (epitope-binding) domain binding CD3 are fused to another domain via a peptide linker.
[0888] xlxxx) The polypeptide or polypeptide construct according to any one of the preceding items, wherein the polypeptide or polypeptide construct comprises in an amino to carboxyl order, or in a carboxyl to amino order:
   [0889] (a) an antigen-binding (epitope-binding) domain binding to CLDN6;
   [0890] (b) a peptide linker, particularly a peptide linker having an amino acid sequence selected from the group consisting of SEQ ID NOs: 563-575;
   [0891] (c) an antigen-binding (epitope-binding) domain binding to CD3.
[0892] xlxxxi) The polypeptide or polypeptide construct according to any one of the preceding items, wherein the polypeptide or polypeptide construct further comprises in an amino to carboxyl order, or in a carboxyl to amino order, or between the antigen-binding (epitope-binding) domain binding to CLDN6 and the antigen-binding (epitope-binding) domain binding to CD3:
   [0893] (a) a peptide linker having an amino acid sequence selected from the group consisting of SEQ ID NOs: 563-575;
   [0894] (b) the first polypeptide monomer of a third domain;
   [0895] (c) a peptide linker having an amino acid sequence selected from the group consisting of SEQ ID NOs: 563-575; and
   [0896] (d) the second polypeptide monomer of said third domain.
[0897] xlxxxii) The polypeptide or polypeptide construct according to any one of the preceding items, wherein the construct is depicted in any one of the sequences depicted in SEQ ID NO: 21, 24, 35, 38, 49, 52, 63, 66, 77, 80, 91, 94, 105, 108, 119, 122, 133, 136, 147, 150, 161, 164, 175, 178, 189, 192, 203, 206, 217, 220, 231, 234, 245, 148, 259, 262, 273, 276, 287, 290, 301, 304, 315, 318, 329, 332, 343, 346, 357, 360, 371, 374, 385, 388, 399, 402, 413, 416, 427, and 430, particularly, 21, 24, 35, 38, 49, 52, 63, 66, 77, 80, 91, 94, more particularly, 21, 24, 35, 38, 49, 52, 77, and 80, and even more particularly, 21, 35, 49, and 77.
[0898] xlxxxiii) The polypeptide or polypeptide construct according to any one of the preceding items, wherein the construct comprises a domain binding to CD3 comprising a VH domain comprising at least one, two, or all of the following CDR sequences as depicted in SEQ ID NO: 670, 671, and/or 672.
[0899] xlxxxiv) The polypeptide or polypeptide construct according to any one of the preceding items, wherein the construct comprises a domain binding to CD3 comprising a VL domain comprising at least one, two, or all of the following CDR sequences as depicted in SEQ ID NO: 673, 674, and/or 675.
[0900] xlxxxv) The polypeptide or polypeptide construct according to any one of the preceding items, wherein the construct comprises a domain binding to CD3 comprising a VH and a VL domain comprising at least one, two, or all of the following CDR sequences as depicted in SEQ ID NO: 670, 671, 672, 673, 674, and/or 675.
[0901] xlxxxvi) The polypeptide or polypeptide construct according to any one of the preceding items, wherein the construct comprises a domain binding to CD3 comprising a VH domain as depicted in SEQ ID NO: 676.
[0902] xlxxxvii) The polypeptide or polypeptide construct according to any one of the preceding items, wherein the construct comprises a domain binding to CD3 comprising a VL domain as depicted in SEQ ID NO: 677.
[0903] xlxxxviii) The polypeptide or polypeptide construct according to any one of the preceding items, wherein the construct comprises a domain binding to CD3 comprising a VH domain as depicted in SEQ ID NO: 676 and a VL domain as depicted in SEQ ID NO: 677.
[0904] xlxxxix) The polypeptide or polypeptide construct according to any one of the preceding items, wherein the construct comprises a domain binding to CD3 comprising a scFv domain as depicted in SEQ ID NO: 678.
[0905] xc) A polynucleotide encoding a polypeptide or polypeptide construct as defined in any one of the preceding items.
[0906] ixc) A vector comprising a polynucleotide as defined in item xc).
[0907] iiivc) A host cell transformed or transfected with the polynucleotide as defined in item xc) or with the vector as defined in item ixc).
[0908] iivc) A process for producing a polypeptide or polypeptide construct as defined in any one of the preceding items, said process comprising culturing a host cell as defined in item iiivc) under conditions allowing the expression of said polypeptide construct and recovering the produced polypeptide or polypeptide construct from the culture.
[0909] ivc) A pharmaceutical composition comprising a polypeptide or polypeptide construct as defined in any one of preceding items, or that is produced according to the process of claim iivc).
[0910] vc) The polypeptide or polypeptide construct according to any one of the preceding items or that is produced according to the process of claim iivc) for the use as a medicament, particularly for the use in the prevention, treatment or amelioration of a disease, preferably a neoplasm.
[0911] vic) The polypeptide or polypeptide construct according to claim vc) for the use as a medicament, particularly for the use in the prevention, treatment or amelioration of a disease, wherein the disease or neoplasm is selected from the group consisting of germ cell cancer, ovarian cancer, in particular ovarian adenocarcinoma and ovarian teratocarcinoma, uterine cancer, and lung cancer, including small cell lung cancer (SCLC) and non-small cell lung cancer (NSCLC), in particular squamous cell lung carcinoma and adenocarcinoma.
[0912] viic) The polypeptide or polypeptide construct according to claim vc), wherein the lung cancer is non-small cell lung cancer (NSCLC), in particular squamous cell lung carcinoma and adenocarcinoma.
[0913] viiic) A kit comprising a polypeptide or polypeptide construct as defined in any one of the preceding items, a polypeptide or polypeptide construct produced according to the process of claim vc, a polynucleotide, a vector, and/or a host cell as defined in the above items.
[0914] ic) A method for the treatment or amelioration of a proliferative disease, a tumorous disease, cancer, or an immunological disorder, comprising the step of administering to a subject in need thereof the polypeptide or polypeptide construct according to any one of above items, or produced according to the process according to the above item, wherein the disease preferably is selected from the group consisting of germ cell cancer, ovarian cancer, in particular ovarian adenocarcinoma and ovarian teratocarcinoma, uterine cancer, more particularly from ovarian serous cystadenocarcinoma, uterine carcinosarcoma, uterine corpus endometrial carcinoma, and lung cancer, including small cell lung cancer (SCLC) and non-small cell lung cancer (NSCLC), in particular squamous cell lung carcinoma and adenocarcinoma.

[0915] Whenever the term “construct” is used in the figures, said term refers to the used polypeptide/polypeptide constructs of the invention or controls thereof as indicated.

[0916] As used herein, the singular forms “a”, “an”, and “the” include plural references unless the context clearly indicates otherwise. Thus, for example, reference to “a reagent” includes one or more of such different reagents and reference to “the method” includes reference to equivalent steps and methods known to those of ordinary skill in the art that could be modified or substituted for the methods described herein.

[0917] Unless otherwise indicated, the term “at least” preceding a series of elements is to be understood to refer to every element in the series. Those skilled in the art will recognize or be able to ascertain using no more than routine experimentation, many equivalents to the specific embodiments of the invention described herein. Such equivalents are intended to be encompassed by the present invention.

[0918] The term “and/or” wherever used herein includes the meaning of “and”, “or” and “all or any other combination of the elements connected by said term”.

[0919] The term “about” or “approximately” as used herein means within ±20%, preferably within ±15%, more preferably within ±10%, and most preferably within ±5% of a given value or range. It also includes the concrete value, e.g., “about 50” includes the value “50”.

[0920] Throughout this specification and the claims, unless the context requires otherwise, the word “comprise”, and variations such as “comprises” and “comprising”, will be understood to imply the inclusion of a stated integer or step or group of integers or steps but not the exclusion of any other integer or step or group of integer or step. When used herein the term “comprising” can be substituted with the term “containing” or “including” or sometimes when used herein with the term “having”.

[0921] When used herein “consisting of” excludes any element, step, or ingredient not specified in the claim element. When used herein, “consisting essentially of” does not exclude materials or steps that do not materially affect the basic and novel characteristics of the claim.

[0922] In each instance herein, any of the terms “comprising”, “consisting essentially of” and “consisting of” may be replaced with either of the other two terms.

[0923] The above description and the below examples provide exemplary arrangements, but the present invention is not limited to the specific methodologies, techniques, protocols, material, reagents, substances, etc., described herein and as such can vary. The terminology used herein serves to describe specific embodiments only. The terminology used herein does not intend to limit the scope of the present invention, which is defined solely by the claims. Aspects of the invention are provided in the independent claims. Some optional features of the invention are provided in the dependent claims.

[0924] All publications and patents cited throughout the text of this specification (including all patents, patent applications, scientific publications, manufacturer's specifications, instructions, etc.), whether supra or infra, are hereby incorporated by reference in their entirety. Nothing herein is to be construed as an admission that the invention is not entitled to antedate such disclosure by virtue of prior invention. To the extent the material incorporated by reference contradicts or is inconsistent with this specification, the specification will supersede any such material.

[0925] A better understanding of the present invention and of its advantages will be obtained from the following examples, offered for illustrative purposes only. The examples are not intended and should not be construed as to limit the scope of the present invention in any way.

### FIGURES

[0926] FIG. 1 shows the results of the epitope mapping analysis. The topmost row provides structure representations of either CLDN4 (dashed graph) and CLDN6 (continuous graphs) and chimeric proteins, indicating the various regions of the CLDN6 that have been replaced by the respective CLDN4 regions. The second and third rows from the above show the results of FACS analyses using isotype controls and anti-CLDN4-Ab and anti-CLDN6-Ab (5 μg/ml Isotype control (R&D IC003P)+5 μg/ml anti-CLDN4-ab (clone 382321 R&D MAB4219). The two left FACS results show that cells that neither express CLDN4 nor CLDN6 are not recognized by either of the antibodies immunospecifically detecting CLDN-4 or CLDN-6. The four rows at the bottom show the results of FACS analyses using four different polypeptides/polypeptide constructs of the invention as primary binders (5 μg/ml CLDN6-polypeptides/polypeptide constructs) or PBS with 2% FCS as controls 4 lead candidates: SEQ ID NO: 343, SEQ ID NO. 35, SEQ ID NO. 21, and SEQ ID NO: 105 (from top to bottom). As secondary binders, 1:50 anti-hu Fcy-PE (Jacks.Imm.Res. 109-116-98) is used. The E1A and E2B regions are particularly important for the binding of some polypeptides/polypeptide constructs of the invention to CLDN6. On the ordinate axis (x-axis) the numbers 0, 20, 40, 60, 80, and 100 are depicted. On the abscissa (y-axis) the values 10¹, 10², 10³, 10⁴, and 10⁵ are indicated.

[0927] FIG. 2 shows the results of experiments of human pan T cells that were incubated with target cells in a 10:1 ratio and polypeptides/polypeptide constructs in the concentrations indicated. After 48 hours, cell viability was measured with a Cell Titer-glossary and percent cytotoxicity was calculated. Graphs show representative data for duplicate samples (>2 independent experiments were run). Data were analyzed with GraphPad Prism. Similarly, experiments were conducted with a polypeptide construct based on a prior art antibody (A3E-20; disclosed in WO 2009/087978). The CLDN6 constructs in SEQ ID NOs: 21, 24, 217, 147, 119, and 90 are more potent than the A3E-20-based polypeptide construct; CLDN6×CD3 polypeptides/polypeptide constructs according to the invention have >3000-fold selectivity for CLDN6 as compared to CLDN9. FIG. 2A=PA-1 cells; FIG. 2B=CHO-CLDN6; FIG. 2C=CHO-CLDN9.

[0928] FIG. 3 shows that equivalent activity of constructs selectively binding CLDN6 having different CD3 binding moieties CLDN6XI2C and CLDN6XI2E molecules according to the invention (SEQ ID NOs.: 21 and 24); CLDN6-dependent cytotoxic activity. Human pan T cells were incubated with target cells in a 10:1 ratio and polypeptide construct in the concentrations indicated. After 48 hours, cell viability was measured with a Cell Titer-gloassay and percent cytotoxicity was calculated. Graphs show representative data for duplicate samples (>2 independent experiments were run). Data were analyzed with GraphPad Prism. The CLDN6xI2C molecule and CLDN6xI2E molecule molecules according to the invention (SEQ ID NOs.: 21 and 24) have equivalent cytotoxic activity in vitro; both molecules show specificity for killing of CLDN6-expressing cells (FIGS. 3 A) and B)).

[0929] FIG. 4 shows the results of human PBMCs that were incubated with different target cells in a 5:1 ratio and polypeptides/polypeptide constructs in the concentrations indicated. After 48 hours, cell viability was measured with a flow-cytometry-based assay and percent cytotoxicity was calculated. Graphs show representative data from three PBMC donors (>2 independent experiments were run). Data were analyzed with GraphPad Prism. Black lines, CLDN6xI2C (SEQ ID NO: 24); gray lines, CLDN6xI2E (SEQ ID NO: 21). The numbers (#150, #156, #158) refer to three different donors of human PBMCs FIGS. 4A) to 4F)). The cell lines used are indicated above the graphs (FIG. 4A: COV-362, FIG. 4B: LCLC-97TIM1, FIG. 4C: NCI-H322, FIG. 4D: NCI-H1435, FIG. 4E: OV-90, and FIG. 4F: OVCAR-3).

[0930] FIG. 5 shows the results of a different concentration ranges of CLDN6 HLE BiTE (I2C) (SEQ ID NO.: 24) that were incubated with CHO-CLDN6 and CHO-CLDN9 cells. CHO-CLDN6 and CHO-On cell binding was assessed by flow cytometry. CHO-CLDN6 (left): dashed=mouse isotype control (BD Biosciences), solid=anti-CLDN6 antibody (Creative Biolabs, TAB-510LC, based on AE3-20 clone); CHO-CLDN9 (right): dashed=rat isotype control (BD Biosciences), solid=anti-CLDN9 antibody (Abcam, ab187116, YD4E9 clone); Secondary antibody (BV421 channel, BD Biosciences)

[0931] FIGS. 6 to 8 show that CLDN6 HLE polypeptides/polypeptide constructs have cytotoxic activity against different types of target cells that show low level CLDN6 expression by IHC. FIG. 6A: CHO-CLDN6: dashed=mouse isotype control (BD Biosciences), solid=anti-CLDN6 antibody (Creative Biolabs, TAB-510LC, based on AE3-20 clone); Secondary (APC channel, Jackson ImmunoResearch); FIG. 6B: OVCAR-3: dashed=mouse isotype control (BD Biosciences), solid=anti-CLDN6 antibody (Creative Biolabs, TAB-510LC, based on AE3-20 clone); Secondary (APC channel, Jackson ImmunoResearch); FIG. 6C: COV-362: dashed=mouse isotype control (BD Biosciences), solid=anti-CLDN6 antibody (Creative Biolabs, TAB-510LC, based on AE3-20 clone); Secondary (APC channel, Jackson ImmunoResearch); FIG. 6D: NCI-H322: dashed=mouse isotype control (BD Biosciences), solid=anti-CLDN6 antibody(Creative Biolabs, TAB-510LC, based on AE3-20 clone); Secondary antibody (BV421 channel, BD Biosciences); FIGS. 7A and 7B: PA-1: dashed=mouse isotype control (BD Biosciences), solid=anti-CLDN6 antibody (Creative Biolabs, TAB-510LC, based on AE3-20 clone); Secondary (APC channel, Jackson ImmunoResearch); FIGS. 7C and 7D: OVCAR-3: dashed=mouse isotype control (BD Biosciences), solid=anti-CLDN6 antibody (Creative Biolabs, TAB-510LC, based on AE3-20 clone); Secondary (APC channel, Jackson ImmunoResearch); FIGS. 7E and 7F: OAW28: dashed=mouse isotype control (BD Biosciences), solid=anti-CLDN6 antibody (Creative Biolabs, TAB-510LC, based on AE3-20 clone); Secondary (APC channel, Jackson ImmunoResearch); FIGS. 7G and 7H: LCLC-97TM1: dashed=mouse isotype control (BD Biosciences), solid=anti-CLDN6 antibody (Creative Biolabs, TAB-510LC, based on AE3-20 clone); Secondary (APC channel, Jackson ImmunoResearch); FIGS. 7I and 7J: NCI-H1435: dashed=mouse isotype control (BD Biosciences), solid=anti-CLDN6 antibody (Creative Biolabs, TAB-510LC, based on AE3-20 clone); Secondary (APC channel, Jackson ImmunoResearch).

[0932] FIG. 9—Antitumor efficacy against established OVCAR-3 xenograph tumors

[0933] FIG. 10 shows that hallmarks of engagement characteristic of T cell-activating polypeptides/polypeptide constructs were observed in an exploratory toxicology study.

[0934] FIG. 11 demonstrates that a CLDN6 HLE polypeptide construct according to the invention (SEQ ID NOs.:24) has extended half-life in non-human primates.

### EXAMPLE 1

### CLDN6 Binder Generation

### Hybridoma Generation

[0935] Pooled lymphocytes from spleen and lymph nodes are enriched for IgG+B-cells followed by electrocell fusion with mouse P3 myeloma cells. Fused hybridoma cells are cultured for 2-5 days in hyaluronic acid (HA) selection medium and then plated onto 96-well culture plates and cultured for 2 weeks to generate exhausted supernatant (ESN).

### Screening and Sequence Analysis

[0936] In primary screening, 837 human CLDN6 on-cell binding hybridomas are identified using Fluorescent Microvolume Assay Technology (FMAT). A second late primary screening via Flow Cytometry also confirms 776 of these hybridomas that bind to 293T transiently expressing cynomolgus monkey CLDN6. To further characterize the 837 CLDN6 binding hybridomas, the ESN are tested by antibody-dependent cellular cytotoxicity (ADCC) activity on PA-1 cells for a shortlist of 288 hybridomas with best killing activity. Most of these hybridomas show ADCC killing of OVCAR3 cells expressing CLDN6. The ESN of these hybridomas are further characterized for cross-reactive binding to 293 T cells transiently expressing human CLDN3, CLDN4, CLDN8 or CLDN9 on the cell surface.

[0937] In total, 20 hybridoma lines identified based on the criteria of ADCC killing in PA-1 and OVCAR3 cell lines show no cross-reactivity to CLDN3, CLDN4 and CLDN8. These hybridomas are sequenced followed by recombinant mAb generation and scaling up. These antibodies included, inter alia, three clones that showed qualifying sequence and binding properties and were selected for conversion into scFv and polypeptides/polypeptide constructs.

### Anti-CLDN6 Polypeptide Construct Generation

[0938] Assembly of anti-CLDN6 targeting polypeptides/polypeptide constructs binders is carried out by gene synthesis. In more detail: The VH of the anti-CLDN6 heavy chain and VL of the anti-CLDN6 light chain DNA are derived from hybridoma clones. Amino acid position 44 in VH and position 100 in VL (Kabat numbering) are changed to cysteine, which results in an additional disulfide bond stabilizing the target binder. A linker, e.g. consisting of three repeats of four glycines and a serine (G4S1)3-linker may be inserted between VL and VH creating a single chain Fragment variable (scFv). A human IgG heavy chain signal peptide containing a start codon embedded within a Kozak consensus sequence may be added to the N-terminus of the anti-CLDN6 binders. The assembled anti-CLDN6 target binders are converted into the recombinant bispecific single-chain binder format by joining with an anti-CD3ε specific scFv-binder, which is human in sequence and cross-reactive with human and macaque CD3ε. In these constructs the anti-CD3ε scFv is fused to a single chain Fc (scFc) half-life extension (HLE) moiety which has a C-terminal stop codon attached in frame. Human anti-CLDN6 binders were joined with the anti-CD3ε binder and the scFc in a mammalian expression vector. Some of the human anti-CLDN6 HLE polypeptides/polypeptide constructs have the domain arrangement VL CLDN6—(G4S1)3-VH CLDN6-S1G4S1—VHCD3—Peptide linker (G4S1)3—VLCD3—Peptide linker (G4)—Fc—(G4S1)6—Fc; others have the domain arrangement VH (CLDN6)—(G4S)3—VL (CLDN6)—Peptide linker (SG4S)—VH (CD3)—(G4S)3—VL (CD3)—Peptide linker (G4)—Fc—(G4S)6—Fc.

### Exemplary Sequence Optimization of Anti-CLDN6 Binder

[0939] Based on rational design a sequence optimization approach was carried out. Furthermore, a LC shuffling approach was performed to further improve the binding and protein properties of a selected polypeptide construct clone using a clonal hitpick repertoire of 899 CLDN6 binding clones. For this repertoire, a library of human light chain Vkappa variable regions was constructed using PCR Primers and ligated with the phagemid pComb3H5BHis (WO 99/25818; Saci-Spel digested) containing the VH of selected polypeptide construct clone CLDN6. The resulting combinatorial Ig light chain variable antibody library was then transformed into E. coli TG1, plated on agar and single clones were screened for binding to human CLDN6 and human CLDN9 in flow cytometry measurements. To this end, the periplasmic cell extracts of single colonies containing scFv molecules were incubated on CLDN6 transfected CHO-cells or CLDN9 transfected CHO cells and binding was detected by a mouse anti-Flag antibody and a R-Phycoerythrin-conjugated goat anti-mouse IgG or anti-mouse Fcγ-Alexa488 secondary antibody. Samples were measured on a FACSCanto II (BD Biosciences, Heidelberg, FRG).

[0940] In the screening approach clones were identified, combined with the rational design optimization approach described above and led to target binding polypeptides/polypeptide constructs as depicted, for example, in SEQ ID NOs: 21, 24, 35, 38, 49, 52, 63, 66, 77, and 80.

### Evaluation of CLDN6 Bispecific Constructs In Vitro Affinity

[0941] Cell-based affinity of CLDN6 bispecific constructs is determined by nonlinear regression (one site—specific binding) analysis. CHO cells expressing human CLDN6 are incubated with decreasing concentrations of CLDN6 bispecific constructs (400 nM, step 1:2, 11 steps) for 16 h at 4° C. Bound CLDN6 bispecific constructs were detected with Alexa Fluor 488-conjugated AffiniPure Fab Fragment Goat Anti-Human IgG (H+L; Jackson ImmunoResearch).

[0942] Fixed cells were stained with DRAQ5, Far-Red Fluorescent Live-Cell Permeant DNA Dye and signals were detected by Fluorescence Activated Cell Sorting (FACS). Respective equilibrium dissociation constant (Kd) values were calculated with the one site specific binding evaluation tool in the GraphPad Prism software (Graph Pad).

### Cytotoxic Activity

[0943] Human peripheral blood mononuclear cells (PBMC) are prepared by Ficoll density gradient centrifugation from enriched lymphocyte preparations (buffy coats), a side product of blood banks collecting blood for transfusions. Buffy coats were supplied by a local blood bank and PBMC were prepared on the same day of blood collection. After Ficoll density centrifugation and extensive washes with Dulbecco's PBS (Gibco), remaining erythrocytes were removed from PBMC via incubation with erythrocyte lysis buffer (155 mM NH₄Cl, 10 mM KHCO₃, 100 μM EDTA). Platelets were removed via the supernatant upon centrifugation of PBMC at 100×g. Remaining lymphocytes mainly encompass B and T lymphocytes, NK cells and monocytes. PBMC were kept in culture at 37° C./5% CO₂ in RPMI medium (Gibco) with 10% FCS (Gibco).

### Depletion of CD14+ and CD56+ Cells

[0944] For depletion of CD14+ cells, human CD14 MicroBeads (Milteny Biotec, MACS, #130-050-201) were used, for depletion of NK cells human CD56 MicroBeads (MACS, #130-050-401). PBMC were counted and centrifuged for 10 min at room temperature with 300×g. The supernatant was discarded, and the cell pellet resuspended in MACS isolation buffer [80 μL/107 cells; PBS (Invitrogen, #20012-043), 0.5% (v/v) FBS (Gibco, #10270-106), 2 mM EDTA (Sigma-Aldrich, #E-6511)]. CD14 MicroBeads and CD56 MicroBeads (20 μL/107 cells) were added and incubated for 15 min at 4-8° C. The cells were washed with MACS isolation buffer (1-2 mL/107 cells). After centrifugation (see above), supernatant was discarded, and cells resuspended in MACS isolation buffer (500 μL/108 cells). CD14/CD56 negative cells were then isolated using LS Columns (Miltenyi Biotec, #130-042-401). PBMC w/o CD14+/CD56+ cells were cultured in RPMI complete medium i.e. RPMI1640 (Biochrom AG, #FG1215) supplemented with 10% FBS (Biochrom AG, #S0115), lx non-essential amino acids (Biochrom AG, #K0293), 10 mM Hepes buffer (Biochrom AG, #L1613), 1 mM sodium pyruvate (Biochrom AG, #L0473) and 100 U/mL penicillin/streptomycin (Biochrom AG, #A2213) at 37° C. in an incubator until needed.

### Target Cell Labeling

[0945] For the analysis of cell lysis in flow cytometry assays, the fluorescent membrane dye DiOC18 (DiO) (Molecular Probes, #V22886) was used to label human CLDN6- or macaque CLDN6-transfected CHO cells as target cells and distinguish them from effector cells. Briefly, cells were harvested, washed once with PBS and adjusted to 106 cell/mL in PBS containing 2% (v/v) FBS and the membrane dye DiO (5 μL/106 cells). After incubation for 3 min at 37° C., cells were washed twice in complete RPMI medium and the cell number adjusted to 1.25×105 cells/mL. The vitality of cells was determined using the NC-250 cell counter (Chemometec)

### Flow Cytometry-Based Analysis

[0946] This assay was designed to quantify the lysis of cynomolgus or human CLDN6-transfected CHO cells in the presence of serial dilutions of CLDN6 bispecific constructs. Equal volumes of DiO-labeled target cells and effector cells (i.e., PBMC w/o CD14+ cells) were mixed, resulting in an E:T cell ratio of 10:1. 80 μl of this suspension were transferred to each well of a 96-well plate. 20 μL of serial dilutions of the CLDN6×CD3 bispecific constructs and a negative control bispecific (a CD3-based bispecific construct recognizing an irrelevant target antigen) or RPMI complete medium as an additional negative control were added. The bispecific antibody-mediated cytotoxic reaction proceeded for 48 hours in a 7% C02 humidified incubator. Then cells were transferred to a new 96-well plate and loss of target cell membrane integrity was monitored by adding propidium iodide (PI) at a final concentration of 1 μg/mL. Samples were measured by flow cytometry on an iQue Plus instrument and analyzed by Forecyt software (both from Intellicyt). Target cells were identified as DiO-positive cells. PI-negative target cells were classified as living target cells. Percentage of cytotoxicity was calculated according to the following formula:

$$\begin{matrix}Cytotoxicity [ \% ] = \frac{{n}_{dead target cells}}{{n}_{target cells}} \times 100 \\ n = number of events\end{matrix}$$

[0947] Using GraphPad Prism 5 software (Graph Pad Software, San Diego), the percentage of cytotoxicity was plotted against the corresponding bispecific construct concentrations. Dose response curves were analyzed with the four parametric logistic regression models for evaluation of sigmoid dose response curves with fixed hill slope and EC50 values were calculated.

### Bispecific Binding and Interspecies Cross-Reactivity

[0948] For confirmation of binding to human CLDN6 and CD3 and to cynomolgus CLDN6 and CD3, polypeptides/polypeptide constructs of the invention were tested by flow cytometry using
[0949] Chinese Hamster Ovary (CHO) cells transfected with human CLDN6, with human CLDN6 isoform (I143V), and with macaque CLDN6, respectively,
[0950] the human CLDN6 positive human cell line PA-1,
[0951] CD3-expressing human T cell leukemia cell line HPB-all (DSMZ), and
[0952] the cynomolgus CD3-expressing T cell line LnPx 4119

[0953] For confirmation of absence of binding to CHO CLDN1, -3, -4, -8, -17 bispecific constructs of the invention were tested by flow cytometry using CHO cells transfected with human CLDN1, -3, -4, -8 and -17. For flow cytometry 200,000 cells of the respective cell lines were incubated for 60 min at 4° C. with 50 l of purified bispecific construct at a concentration of 5 μg/ml. The cells were washed twice in PBS/2% FCS and then incubated with an in-house mouse antibody (2 μg/ml) specific for the CD3 binding part of the bispecific constructs for 30 min at 4° C. After washing, bound mouse antibodies were detected with a goat anti-mouse Fcγ-PE (Jackson ImmunoResearch; 1:100) for 30 min at 4° C. Samples were measured by flow cytometry. Non-transfected CHO cells (DSMZ) were used as negative control.

### Generation of CHO Cells Expressing CLDN6 Mutations

[0954] For the generation of CHO cells expressing hu-CLDN6, hu-CLDN9, hu-CLDN4 (SEQ ID NOs: 1, 8, and 7) as controls, the respective coding sequences were cloned into a plasmid designated pEF-DHFR (pEF-DHFR as described in Raum et al. Cancer Immunol Immunother 50 (2001) 141-150). All cloning procedures were carried out according to standard protocols (Sambrook, Molecular Cloning; A Laboratory Manual, 3rd edition, Cold Spring Harbour Laboratory Press, Cold Spring Harbour, New York (2001)). For each construct, a corresponding plasmid was transfected into DHFR deficient CHO cells for eukaryotic expression, as described by Kaufman R. J. (1990) Methods Enzymol. 185, 537-566. The expression of the above polypeptides/polypeptide constructs on CHO cells was verified in a FACS assay using antibodies against CLDN4, CLDN6 (R&D mouse anti-human CLDN6 monoclonal antibody MAB3656) and CLDN9 (rat anti-human CLDN9 monoclonal antibody ABIN1720917), respectively, at a concentration of 5 μg/ml. As negative control, cells were incubated with an isotype control antibody (BD 553454/R&D MAB0041/R&D MAB0061) instead of the first antibody. Bound monoclonal antibody was detected with a secondary anti-mouse/anti-rat/anti-human IgG Fc-gamma-PE (Jackson ImmunoResearch 115-116-071/112-116-071/109-116-098). The samples were measured by flow cytometry.

### EXAMPLE 2

### Epitope Mapping of Anti-CLDN6 Constructs

[0955] For epitope mapping, E1 (extracellular loop 1; ECL1) of CLDN6 is divided into three sub-domains (E1A, E1B, and E1C), and E2 (extracellular loop 2; ECL2) is divided into two sub-domains (E2A and E2B). The amino acid sequence of the respective epitope region (loop/domain or sub-domain) of human CLDN6 (E1, E1A, E1B, E1C, E2, E2A and E2B) is exchanged for a counterpart sequence of human CLDN4. The expression of all chimeric constructs in CHO cells is verified via FACS analysis. CHO cells transfected with the constructs described in Example 1 are stained with purified CLDN6×CD3 polypeptide construct at a concentration of 20 μg/ml. Bound constructs are detected with an anti-human IgG Fc-gamma-PE (Jackson ImmunoResearch; 1:100). Antibodies are diluted in PBS/2% FCS. As negative control, cells are incubated with PBS/2% FCS followed by the anti-human IgG Fc-gamma-PE. The samples are measured by flow cytometry. The results of the epitope mapping analysis are shown in FIG. 1. When a loss of the FACS signal is observed for cells expressing a certain CLDN6 chimera or mutation, the respective CLDN6×CD3 polypeptide construct is assumed to bind to the epitope (loop/domain/sub-domain) or to the specific amino acid that was exchanged in this CLDN6 chimeric or mutated polypeptide construct. In other words, this epitope region or amino acid is required for the binding of the CLDN6×CD3 polypeptide construct that was analyzed. In addition to the control antibodies which were used to demonstrate proper expression of the respective target, CLDN6×CD3 polypeptides/polypeptide constructs were specifically tested in the epitope mapping analysis. As shown in FIG. 1, the CLDN6×CD3 polypeptides/polypeptide constructs according to the invention (e.g., SEQ ID NOs: 21, 35, 49, 77, 203, etc.) require regions E1A and/or E2B for its selective binding to CLDN6. Consequently, and likewise, an exchange of these sub-domains with the CLDN4 counterpart sequence leads to a loss of the FACS signal.

### EXAMPLE 3

### Biacore-Based Determination of Affinity to Human and Cynomolgus CD3 and FcRn

[0956] Biacore analysis experiments were performed using recombinant human/macaque CD3-ECD (ECD=extracellular domain) fusion proteins with chicken albumin to determine target binding of the constructs of the invention.

### EXAMPLE 4

### Comparison of CLDN6×CD3 HLE Polypeptides/Polypeptide Constructs with Different CD3-Specific Paratopes and a Polypeptide Construct Based on Antibody AE3-20

[0957] A comparison of cytotoxic activity and specificity for CLDN6 of CLDN6×CD3 (Variant I2C), CLDN6×CD3 (Variant 12E) as depicted in SEQ ID NOs.: 21, 24 and other CLDN6×CD3 (Variant I2C) polypeptides/polypeptide constructs according to the invention as well as a polypeptide construct based on monoclonal antibody AE3-20 (disclosed in WO 2009/087978; depicted in SEQ ID NO: 441) was performed.

[0958] Additional comparisons of the CLDN6xI2C and CLDN6xI2E (as depicted in SEQ ID NOs.: 21 and 24) cytotoxicity in ovarian cancer cell lines and non-small cell lung cancer cell lines. For binding analysis of the AE3-20 polypeptide construct via flow cytometry CHO cells transfected with human CLDN6, hu CLDN4 or human CLDN9 were used. For flow cytometry respective CHO cells were incubated with AE3-20 polypeptide construct (5 μg/ml) or with the following monoclonal antibodies as positive control for cell surface expression: anti-CLDN6 (R&D Systems, MAB3656), anti-CLDN4 (R&D Systems, MAB4219) and anti-CLDN9 (Origene, AM26751PU-N). Binding of the AE-320 polypeptide construct or positive control antibodies was detected using mouse anti-human IgG Fc antibody conjugated to R-phycoerythrin (PE), goat anti-mouse Fc gamma-specific antibody conjugated to PE (Jackson ImmunoResearch 115-116-071) or goat anti-rat Fc gamma-specific antibody conjugated to PE (Jackson ImmunoResearch 112-116-071). As negative control respective isotype control antibodies were used.

[0959] Polypeptides that target CLDN6 epitope clusters E1A/E2B or E1A/(E2B) show unexpected higher potency compared to BiTE molecules targeting E1A/E2A+B or E2A/(E2B) (AE-320 epitope). The higher potency of polypeptides targeting CLDN6 epitope clusters E1A/E2B or E1A/(E2B) can also be observed compared to BiTE molecules targeting E2A/(E2B) (AE-3-20 epitope), although the candidates are in a similar affinity range. Surprisingly, it was noted that the epitope cluster E2A should be avoided to get sufficient potency while remaining selectivity over CLDN9. The herein investigated polypeptides, particularly those depicted in SEQ ID NOs.: 21, 24, 35, 38, 49, 52, 63, 66, 77, and 80, and more particularly SEQ ID NOs: 21 and 24 have also favourable protein properties, in particular stability in terms of favourable % monomer conversion after storage in solution at 1 mg/ml and upon repeated freeze/thaw cycles, minimal turbidity at higher protein concentration in solution over night and thermostability whilst maintaining favourable potency against CLDN6+ cell lines and very good affinity.

### Potency and Specificity of CLDN6×CD3 Constructs

[0960] Human pan T cells (AllCells) were incubated with target cells in a 10:1 ratio and polypeptides/polypeptide constructs in the concentrations indicated in a T cell-dependent cellular cytotoxicity (TDCC) assay. After 48 hours, cell viability was measured with a Cell Titer-glo® assay (Promega) and percent cytotoxicity was calculated. Graphs in FIG. 2 show representative data for duplicate samples (>2 independent experiments were run). Data were analyzed with GraphPad Prism. Similarly, experiments were conducted with a polypeptide construct based on a prior art antibody (AE3-20; Chugai) as disclosed in WO 2009/087978. The CLDN6 polypeptides/polypeptide constructs in SEQ ID NOs: 21 and 24 are more potent than the A3E-20-based polypeptide construct; CLDN6×CD3 polypeptides/polypeptide constructs have >3000-fold selectivity for CLDN6 as compared to CLDN9.

CLDN6 HLE Polypeptides/Polypeptide Constructs—Comparison with Constructs Based on AE3-20

[0961] TDCC assay: CLDN6-expressing ovarian cancer cell line PA-1, and CHO cells transfected to stably express CLDN6 or CLDN9, were used as target cells to evaluate the in vitro cytotoxicity of CLDN6 constructs of the present invention. Cells were plated in media containing 10% fetal bovine serum in 384-well microplates (PerkinElmer), and human pan-T cells from two donors (AllCells) were added at a 10:1 ratio to the target cells. CLDN6 constructs of the present invention were added in a 22-point dose range with 60 nM as the top concentration and 5-fold dilutions. After 48 hours incubation at 37° C. in a 5% CO2 humid chamber, cell viability was assessed with a Cell Titer-glo® assay (Promega) according to the manufacturer's instructions. Luminescent signal was measured with a PerkinElmer Envision. Data were analyzed in GraphPad Prism using non-linear regression—variable slope (four parameters). The graphs show the mean values and standard deviation for dose-response curves of duplicate samples.

### Activity of Polypeptides/Polypeptide Constructs Selectively Binding CLDN6 Having Different CD3 Binding Moieties

[0962] Human pan T cells were incubated with target cells in a 10:1 ratio and polypeptide construct in the concentrations indicated. After 48 hours, cell viability was measured with a Cell Titer-glo assay and percent cytotoxicity was calculated. Graphs in FIG. 3 show representative data for duplicate samples (>2 independent experiments were run). Data were analyzed with GraphPad Prism. CLDN6xI2C molecule and the CLDN6xI2E molecules according to the invention (SEQ ID NOs.: 21 and 24); CLDN6-dependent cytotoxic activity were used (FIG. 3).

[0963] The CLDN6xI2C molecule and the CLDN6xI2E molecules according to the invention (SEQ ID NOs.: 21 and 24) have equivalent cytotoxic activity in vitro and both molecules show specificity for killing of CLDN6-expressing cells. In another set of experiments, human PBMCs were incubated with target cells in a 5:1 ratio and polypeptides/polypeptide constructs in the concentrations indicated. After 48 hours, cell viability was measured with a flow-cytometry-based assay and percent cytotoxicity was calculated. Graphs show representative data from three PBMC donors (>2 independent experiments were run).

[0964] Data were analyzed with GraphPad Prism. Black lines, CLDN6xI2C (SEQ ID NO: 24); gray lines, CLDN6xI2E (SEQ ID NO: 21). The numbers (#150, #156, #158) refer to three different donors of human PBMCs FIGS. 4A) to 4F)). The cell lines used are indicated above the graphs (FIG. 4A: COV-362, FIG. 4B: LCLC-97TIM1, FIG. 4C: NCI-H322, FIG. 4D: NCI-H1435, FIG. 4E: OV-90, and FIG. 4F: OVCAR-3).

### EXAMPLE 5

### CLDN6 HLE Polypeptides/Polypeptide Constructs are Selective for CLDN6 Over CLDN9

[0965] A concentration range of CLDN6 HLE BiTE (I2C) (SEQ ID NO.: 24) was incubated with CHO-CLDN6 and CHO-CLDN9 cells (FIG. 5A) and B)). CHO-CLDN6 and CHO-CLDN9 On-cell binding was assessed by flow cytometry (FIG. 5). On cell binding was assessed by flow cytometry, using a secondary antibody conjugated to APC. FIG. 5C) shows that polypeptides/polypeptide constructs of the present invention bind selectively and specifically to CLDN6, but not to CLDN9 expressed by CHO cells. Data were analyzed with FlowJo software (FlowJo, LLC). Alignment of CLDN6 and CLDN9 was conducted using Geneious software.

### EXAMPLE 6

### CLDN6 HLE Polypeptides/Polypeptide Constructs have Cytotoxic Activity Against Cells that Show Low Level CLDN6 Expression by IHC

[0966] Various cancer cell lines and CHO cells expressing CLDN6 and CLDN9 were subjected to TDCC assays (FIG. 6). The antibody binding sites (ABC) EC50 values are shown in the table below. Clearly, the polypeptides/polypeptide constructs of the present invention recognize and kill cells expressing lower and higher numbers of CLDN6 sites/cell (see Table 2).

TABLE 2
TDCC EC₅₀ pM if cytotoxicity assays in various cell lines
TDCC EC₅₀ PM

| | Cell line (CLDN6 sites/cell) | | | | | | |
|---|---|---|---|---|---|---|---|
| | | | | | NCI- | CHO- | CHO- |
| | PA-1 | OVCAR-3 | OAW28 | LCLC97TM1 | H1435 | CLDN6 | CLDN9 |
| | (400,000) | (200,000) | (65,000) | (100,000) | (55,000) | (900,000) | (400,000) |
| EC₅₀ | 1.8 + 0.7 | 10.4 + 4.1 | 24.2 + 14.7 | 3.6 ± 1.0 | 1.9 ± 0.3 | 9.1 ± 10.4 | >30,000 |

*ABC = antibody binding sites. CLDN6 cell surface expression was evaluated by flow cytometry, using a QIFIKit ® (Agilent). Cytotoxic activity was evaluated in TDCC assays. Human T cells were incubated with target cells in a 10:1 ratio and different polypeptides according to the invention (see FIG. 7E); SEQ ID NOs.: 21, 35, 49, 77, 203 at the concentrations indicated. After 48 hours, cell viability was assessed by a Cell Titer-glo ® assay (Promega). Data were analyzed in GraphPad Prism. Cytotoxicity in vitro was determined to choose polypeptides/polypeptide constructs for subsequent in vivo studies. As shown below in the table CLDN6 HLE polypeptides/polypeptide constructs (SEQ ID NOs.: 21 and 24) have potent cytotoxic activity (FIGS. 6 and 7).

### EXAMPLE 7

### CLDN6 HLE Polypeptides/Polypeptide Constructs Induce T Cell Activation

[0967] Human pan-T cells were incubated with target cells in a 10:1 ratio and an exemplary polypeptides/polypeptide constructs according to the invention (SEQ ID NO.: 21) at the indicated concentrations. After 48 hours, T cell activation (up-regulation of CD25, CD69 and PD-1) was evaluated by flow cytometry. Cell viability was assessed by a Cell Titer-glo® assay. These data showing the expression of these biomarkers demonstrate clearly that the polypeptides/polypeptide constructs induce T cell activity (FIGS. 8 A) to E)).

### EXAMPLE 8

### Antitumor Efficacy Against Established OVCAR-3 Xenograph Tumors

[0968] Female NSG mice (10 per group) were inoculated with 5e6 cells/mouse subcutaneously. T cells that were used were activated human pan T cells, 2e7 cells per mouse. Once tumors were allowed to form to a size of 200 mm3, and then human T cells were injected IP, mice were treated with vehicle only or with CLDN6×CD3 HLE (SEQ ID NO: 21) once weekly (FIG. 9A) to C)). FIGS. 9 A) to C) shows the results of measurements of the tumor volume over time (days at the x-axis), measurement of the body weight over time, as well as pharmacokinetic data (serum concentration over time) at different concentrations.

### EXAMPLE 9

### CLDN6×CD3 HLE was Tolerated at Doses of <100 m2/k2

[0969] A study was performed with the objective of evaluating the tolerability of a CLDN6×CD3 HLE according to the invention (SEQ ID NO: 21) in an exploratory PK/tox study in non-human primates (NHP). To this end, flexible and staggered doses were administered to groups; 15 mg/kg, 45 mg/kg, 100 mg/kg (1 animal). The results showed that signs of T cell-dependent activation were noted at all doses. The polypeptide construct of the invention was clinically tolerated up to 100 μg/kg. The results are shown in FIG. 10. Treatment related microscopic findings (minimal to mild) were observed at doses >45 μg/kg in the liver (bile ducts) and skin (IV administration site, anus, mammary gland, dorsum and hindlimb) at ≥45 μg/kg (no findings found at all sites in all animals) and in the mucosal epithelium of esophagus and interstitial lung at ≥100 μg/kg. This study shows that CLDN6 is a safe target as a polypeptide construct.

### EXAMPLE 10

### Hallmarks of Engagement Characteristic of T Cell-Activating Polypeptides/Polypeptide Constructs were Observed in an Exploratory Toxicology Study

[0970] CLDN6 dose-dependent decreases in CD3+T-lymphocytes absolute counts were observed 4 hours post-dosing on Days 1 and 8. The decreases observed at Day 8 were generally not to the same magnitude as Day 1. Transient lymphocyte redistribution followed administration with a transient decrease in total T cell counts were observed in all groups. FIG. 10 indicates T cell-activating polypeptides/polypeptide constructs induce increased activity, e.g. CD69 expression which is observed in mid and high dose groups. T cell activation was assessed by flow cytometry as described above. Further, the absolute number of CD3+T lymphocyte counts and the percentage of CD3+T lymphocyte counts were analysed and it could also be shown that the transient cytokine release (IFN-γ, TNF-α, MCP-1, IL-1β, IL-1rα, IL-2, IL-5, and IL-6) is consistent with the activity of T cell-activating polypeptides/polypeptide constructs. Further, a CLDN6 HLE polypeptide construct according to the invention (SEQ ID NOs.:24) has extended half-life in non-human primates. T cell-activating polypeptides/polypeptide constructs exposure levels in non-human primate serum were evaluated in samples from the toxicology study. The construct demonstrated dose-dependent exposure and an extended half-life (8.39 days) (FIG. 11).

### EXAMPLE 11

### Cytotoxicity Studies In Vitro and In Vivo

[0971] Using the method described in Example 6, different HLE polypeptides/polypeptide constructs of the invention were analyzed for the cytotoxicity in various cell lines. As shown in table 3 the polypeptides/polypeptide constructs of the present invention are cytotoxic in various cell lines.

TABLE 3
TDCC EC₅₀ pM of cytotoxicity assays of different polypeptides
of the invention in various cell lines

| | TDCC EC50 (pM) | | | | |
|---|---|---|---|---|---|
| Polypeptide construct | PA-1 | OVCAR-3 | OAW28 | LCLC97TM1 | NCI-H1435 |
| S3N (SEQ ID NO: 77) | 3.1 + 1.2 | 25.7 + 11.4 | 35.2 + 14.2 | NT | NT |
| L4B (SEQ ID NO: 49) | 3.4 + 1.2 | 19.4 | 44.6 + 19.0 | 10.7 ± 6.3 | 11.6 ± 4.1 |
| X3S (SEQ ID NO: 35) | 2.8 + 1.3 | 19.1 + 6.6 | 30.1 + 10.8 | 5.6 ± 2.5 | 5.9 ± 2.4 |
| B6L (SEQ ID NO: 21) | 1.8 + 0.7 | 10.4 + 4.1 | 24.2 + 14.7 | 3.6 ± 1.8 | 1.9 ± 0.5 |
| A3S (SEQ ID NO: 203) | 4.7 + 1.6 | 28.1 + 12.9 | 65.3 + 37.0 | NT | NT |

### EXAMPLE 12

### Anti-Tumor Activity of AMG 794 was Assessed in a Subcutaneous Advanced-Stage NSCLC Model in Female Non-Obese Diabetic/Severe Combined Immunodeficiency (NOD/SCID) Mice

[0972] Treatment of NCI-H1435-peak-1-1 tumor-bearing mice with CLDN6×CD3 HLE (SEQ ID NO: 21) resulted in a statistically significant TGI at doses of 0.5, 0.15 and 0.05 mg/kg with p values <0.001 when tumor growth was compared with vehicle-treated mice of group 2 between days 17 and 27 using a mixed-effects model followed by Dunnett's post-hoc test. A re-growth of tumors following day 22 until end of tumor growth measurement on day 27 was observed. An increased population of target-negative cells compared to study start and a low number of human lymphocytes was detected in explanted tumors, which could explain the re-growth of tumors following day 22. The TGI achieved on day 22 at doses of 0.5, 0.15 and 0.05 mg/kg CLDN6×CD3 HLE was 91%, 67% or 82%, respectively.

| SEQ | UNIQUE | | |
|---|---|---|---|
| ID | IDENTIFIER / | NATURAL/ | |
| NO: | DESCRIPTION | ARTIFICIAL | SEQUENCE/AA |
| 1 | HUMAN | NATURAL | MASAGMQILGVVLTLLGWVNGLVSCALPMWKVTAFIGNSIVVAQVVWEGLWMSCVVQSTGQM |
| | CLDN-6 | | QCKVYDSLLALPQDLQAARALCVIALLVALFGLLVYLAGAKCTTCVEEKDSKARLVLTSGIV |
| | UNIPROT | | FVISGVLTLIPVCWTAHAIIRDFYNPLVAEAQKRELGASLYLGWAASGLLLLGGGLLCCTCP |
| | P56747 | | SGGSQGPSHYMARYSTSAPAISRGPSEYPTKNYV |
| 2 | HUMAN | NATURAL | MSTTTCQVVAFLLSILGLAGCIAATGMDMWSTQDLYDNPVTSVFQYEGLWRSCVRQSSGFTE |
| | CLDN -18.1 | | CRPYFTILGLPAMLQAVRALMIVGIVLGAIGLLVSIFALKCIRIGSMEDSAKANMTLTSGIM |
| | UNIPROT | | FIVSGLCAIAGVSVFANMLVTNFWMSTANMYTGMGGMVQTVQTRYTFGAALFVGWVAGGLTL |
| | P56856-1 | | IGGVMMCIACRGLAPEETNYKAVSYHASGHSVAYKPGGFKASTGFGSNTKNKKIYDGGARTE |
| | | | DEVQSYPSKHDYV |
| 3 | HUMAN | NATURAL | MAVTACQGLGFVVSLIGIAGIIAATCMDQWSTQDLYNNPVTAVFNYQGLWRSCVRESSGFTE |
| | CLDN -18.2 | | CRGYFTLLGLPAMLQAVRALMIVGIVLGAIGLLVSIFALKCIRIGSMEDSAKANMTLTSGIM |
| | UNIPROT | | FIVSGLCAIAGVSVFANMLVTNFWMSTANMYTGMGGMVQTVQTRYTFGAALFVGWVAGGLTL |
| | P56856-2 | | IGGVMMCIACRGLAPEETNYKAVSYHASGHSVAYKPGGFKASTGFGSNTKNKKIYDGGARTE |
| | | | DEVQSYPSKHDYV |
| 4 | CLDN1 | NATURAL | MANAGLQLLGFILAFLGWIGAIVSTALPQWRIYSYAGDNIVTAQAMYEGLWMSCVSQSTGQI |
| | UNIPROT | | QCKVFDSLLNLSSTLQATRALMVVGILLGVIAIFVATVGMKCMKCLEDDEVQKMRMAVIGGA |
| | O95832-1 | | IFLLAGLAILVATAWYGNRIVQEFYDPMTPVNARYEFGQALFTGWAAASLCLLGGALLCCSC |
| | | | PRKTTSYPTPRPYPKPAPSSGKDYV |
| 5 | CLDN2 | NATURAL | MASLGLQLVGYILGLLGLLGTLVAMLLPSWKTSSYVGASIVTAVGFSKGLWMECATHSTGIT |
| | UNIPROT | | QCDIYSTLLGLPADIQAAQAMMVTSSAISSLACIISVVGMRCTVFCQESRAKDRVAVAGGVF |
| | P57739 | | FILGGLLGFIPVAWNLHGILRDFYSPLVPDSMKFEIGEALYLGIISSLFSLIAGIILCFSCS |
| | | | SQRNRSNYYDAYQAQPLATRSSPRPGQPPKVKSEFNSYSLTGYV |
| 6 | CLDN3 | NATURAL | MSMGLEITGTALAVLGWLGTIVCCALPMWRVSAFIGSNIITSQNIWEGLWMNCVVQSTGQMQ |
| | UNIPROT | | CKVYDSLLALPQDLQAARALIVVAILLAAFGLLVALVGAQCTNCVQDDTAKAKITIVAGVLF |
| | O15551 | | LLAALLTLVPVSWSANTIIRDFYNPVVPEAQKREMGAGLYVGWAAAALQLLGGALLCCSCPP |
| | | | REKKYTATKVVYSAPRSTGPGASLGTGYDRKDYV |
| 7 | CLDN4 | NATURAL | MASMGLQVMGIALAVLGWLAVMLCCALPMWRVTAFIGSNIVTSQTIWEGLWMNCVVQSTGQM |
| | UNIPROT | | QCKVYDSLLALPQDLQAARALVIISIIVAALGVLLSVVGGKCTNCLEDESAKAKTMIVAGVV |
| | O14493 | | FLLAGLMVIVPVSWTAHNIIQDFYNPLVASGQKREMGASLYVGWAASGLLLLGGGLLCCNCP |
| | | | PRTDKPYSAKYSAARSAAASNYV |
| 8 | CLDN9 | NATURAL | MASTGLELLGMTLAVLGWLGTLVSCALPLWKVTAFIGNSIVVAQVVWEGLWMSCVVQSTGQM |
| | UNIPROT | | QCKVYDSLLALPQDLQAARALCVIALLLALLGLLVAITGAQCTTCVEDEGAKARIVLTAGVI |
| | O95484 | | LLLAGILVLIPVCWTAHAIIQDFYNPLVAEALKRELGASLYLGWAAAALLMLGGGLLCCTCP |
| | | | PPQVERPRGPRLGYSIPSRSGASGLDKRDYV |
| 9 | E1A | ARTIFICIAL | MWKVTAFIGNS |
| | HUMAN | | |
| | CLDN-6 E1A | | |
| 10 | E2B HUMAN | ARTIFICIAL | LVAEAQKREL |
| | CLDN-6 | | |
| 11 | B6L/VH | ARTIFICIAL | QVQLVQSGAEVKKPGASVKVSCKASGYTFTGYYMHWVRQAPGQCLEWMGWINPNSGETNYAQ |
| | | | KFQGRVTMTRDTSISTAYMELSRLRSDDTAVYYCARDALIVVAPVTRDYYYYGMDVWGQGTT |
| | | | VTVSS |
| 12 | B6L/VL | ARTIFICIAL | EIVLTQSPGTLSLSPGERATLSCRASQSVSSSYLAWYQQKPGQAPRLLIYGASSRATGIPDR |
| | | | FSGSGSGTDFTLTISRLEPEDFAVYYCQQYGSSPLTFGCGTKLEIK |
| 13 | B6L/CDR-H1 | ARTIFICIAL | GYYMH |
| 14 | B6L/CDR-H2 | ARTIFICIAL | WINPNSGETNYAQKFQG |
| 15 | B6L/CDR-H3 | ARTIFICIAL | DALIVVAPVTRDYYYYGMDV |
| 16 | B6L/CDR-L1 | ARTIFICIAL | RASQSVSSSYLA |
| 17 | B6L/CDR-L2 | ARTIFICIAL | GASSRAT |
| 18 | B6L/CDR-L3 | ARTIFICIAL | QQYGSSPLT |
| 19 | B6L/SCFV | ARTIFICIAL | EIVLTQSPGTLSLSPGERATLSCRASQSVSSSYLAWYQQKPGQAPRLLIYGASSRATGIPDR |
| | I2E | | FSGSGSGTDFTLTISRLEPEDFAVYYCQQYGSSPLTFGCGTKLEIKGGGGSGGGGSGGGGSQ |
| | | | VQLVQSGAEVKKPGASVKVSCKASGYTFTGYYMHWVRQAPGQCLEWMGWINPNSGETNYAQK |
| | | | FQGRVTMTRDTSISTAYMELSRLRSDDTAVYYCARDALIVVAPVTRDYYYYGMDVWGQGTTV |
| | | | TVSS |
| 20 | B6L/ | ARTIFICIAL | EIVLTQSPGTLSLSPGERATLSCRASQSVSSSYLAWYQQKPGQAPRLLIYGASSRATGIPDR |
| | BISPECIFIC | | FSGSGSGTDFTLTISRLEPEDFAVYYCQQYGSSPLTFGCGTKLEIKGGGGSGGGGSGGGGSQ |
| | MOL I2E | | VQLVQSGAEVKKPGASVKVSCKASGYTFTGYYMHWVRQAPGQCLEWMGWINPNSGETNYAQK |
| | | | FQGRVTMTRDTSISTAYMELSRLRSDDTAVYYCARDALIVVAPVTRDYYYYGMDVWGQGTTV |
| | | | TVSSSGGGGSEVQLVESGGGLVQPGGSLKLSCAASGFTFNKYAINWVRQAPGKGLEWVARIR |
| | | | SKYNNYATYYADAVKDRFTISRDDSKNTVYLQMNNLKTEDTAVYYCARAGNFGSSYISYWAY |
| | | | WGQGTLVTVSSGGGGSGGGGSGGGGSQTVVTQEPSLTVSPGGTVTITCGSSTGAVTSGNYPN |
| | | | WVQKKPGQAPRGLIGGTKFLAPGTPARFSGSLSGGKAALTLSGVQPEDEAEYYCVLWYSNRW |
| | | | VFGSGTKLTVL |
| 21 | B6L/HLE- | ARTIFICIAL | EIVLTQSPGTLSLSPGERATLSCRASQSVSSSYLAWYQQKPGQAPRLLIYGASSRATGIPDR |
| | BITE I2E | | FSGSGSGTDFTLTISRLEPEDFAVYYCQQYGSSPLTFGCGTKLEIKGGGGSGGGGSGGGGSQ |
| | | | VQLVQSGAEVKKPGASVKVSCKASGYTFTGYYMHWVRQAPGQCLEWMGWINPNSGETNYAQK |
| | | | FQGRVTMTRDTSISTAYMELSRLRSDDTAVYYCARDALIVVAPVTRDYYYYGMDVWGQGTTV |
| | | | TVSSSGGGGSLVQPGGSLKLSCAASGFTFNKYAINWVRQAPGKGLEWVARIRSKYNNYATYY |
| | | | ADAVKDRFTISRDDSKNTVYLQMNNLKTEDTAVYYCARAGNFGSSYISYWAYWGQGTLVTVS |
| | | | SGGGGSGGGGSGGGGSQTVVTQEPSLTVSPGGTVTITCGSSTGAVTSGNYPNWVQKKPGQAP |
| | | | RGLIGGTKFLAPGTPARFSGSLSGGKAALTLSGVQPEDEAEYYCVLWYSNRWVFGSGTKLTV |
| | | | LGGGGDKTHTCPPCPAPELLGGPSVFLFPPKPKDTLMISRTPEVTCVVVDVSHEDPEVKENW |
| | | | YVDGVEVHNAKTKPCEEQYGSTYRCVSVLTVLHQDWLNGKEYKCKVSNKALPAPIEKTISKA |
| | | | KGQPREPQVYTLPPSREEMTKNQVSLTCLVKGFYPSDIAVEWESNGQPENNYKTTPPVLDSD |
| | | | GSFFLYSKLTVDKSRWQQGNVFSCSVMHEALHNHYTQKSLSLSPGK6GGGGSGGGGSGGGGS |
| | | | GGGGSGGGGSGGGGSDKTHTCPPCPAPELLGGPSVFLFPPKPKDTLMISRTPEVTCVVVDVS |
| | | | HEDPEVKFNWYVDGVEVHNAKTKPCEEQYGSTYRCVSVLTVLHQDWLNGKEYKCKVSNKALP |
| | | | APIEKTISKAKGQPREPQVYTLPPSREEMTKNQVSLTCLVKGFYPSDIAVEWESNGQPENNY |
| | | | KTTPPVLDSDGSFFLYSKLTVDKSRWQQGNVFSCSVMHEALHNHYTQKSLSLSPGK |
| 22 | B6L/SCFV | ARTIFICIAL | EIVLTQSPGTLSLSPGERATLSCRASQSVSSSYLAWYQQKPGQAPRLLIYGASSRATGIPDR |
| | I2C | | FSGSGSGTDFTLTISRLEPEDFAVYYCQQYGSSPLTFGCGTKLEIKGGGGSGGGGSGGGGSQ |
| | | | VQLVQSGAEVKKPGASVKVSCKASGYTFTGYYMHWVRQAPGQCLEWMGWINPNSGETNYAQK |
| | | | FQGRVTMTRDTSISTAYMELSRLRSDDTAVYYCARDALIVVAPVTRDYYYYGMDVWGQGTTV |
| | | | TVSS |
| 23 | B6L/ | ARTIFICIAL | EIVLTQSPGTLSLSPGERATLSCRASQSVSSSYLAWYQQKPGQAPRLLIYGASSRATGIPDR |
| | BISPECIFIC | | FSGSGSGTDFTLTISRLEPEDFAVYYCQQYGSSPLTFGCGTKLEIKGGGGSGGGGSGGGGSQ |
| | MOL I2C | | VQLVQSGAEVKKPGASVKVSCKASGYTFTGYYMHWVRQAPGQCLEWMGWINPNSGETNYAQK |
| | | | FQGRVTMTRDTSISTAYMELSRLRSDDTAVYYCARDALIVVAPVTRDYYYYGMDVWGQGTTV |
| | | | TVSSSGGGGSEVQLVESGGGLVQPGGSLKLSCAASGFTFNKYAMNWVRQAPGKGLEWVARIR |
| | | | SKYNNYATYYADSVKDRFTISRDDSKNTAYLQMNNLKTEDTAVYYCVRHGNFGNSYISYWAY |
| | | | WGQGTLVTVSSGGGGSGGGGSGGGGSQTVVTQEPSLTVSPGGTVTLTCGSSTGAVTSGNYPN |
| | | | WVQQKPGQAPRGLIGGTKFLAPGTPARFSGSLLGGKAALTLSGVQPEDEAEYYCVLWYSNRW |
| | | | VFGGGTKLTVL |
| 24 | B6L/HLE | ARTIFICIAL | EIVLTQSPGTLSLSPGERATLSCRASQSVSSSYLAWYQQKPGQAPRLLIYGASSRATGIPDR |
| | BITE I2C | | FSGSGSGTDFTLTISRLEPEDFAVYYCQQYGSSPLTFGCGTKLEIKGGGGSGGGGSGGGGSQ |
| | | | VQLVQSGAEVKKPGASVKVSCKASGYTFTGYYMHWVRQAPGQCLEWMGWINPNSGETNYAQK |
| | | | FQGRVTMTRDTSISTAYMELSRLRSDDTAVYYCARDALIVVAPVTRDYYYYGMDVWGQGTTV |
| | | | TVSSSGGGGSEVQLVESGGGLVQPGGSLKLSCAASGFTFNKYAMNWVRQAPGKGLEWVARIR |
| | | | SKYNNYATYYADSVKDRFTISRDDSKNTAYLQMNNLKTEDTAVYYCVRHGNFGNSYISYWAY |
| | | | WGQGTLVTVSSGGGGSGGGGSGGGGSQTVVTQEPSLTVSPGGTVTLTCGSSTGAVTSGNYPN |
| | | | WVQQKPGQAPRGLIGGTKFLAPGTPARFSGSLLGGKAALTLSGVQPEDEAEYYCVLWYSNRW |
| | | | VFGGGTKLTVLGGGGDKTHTCPPCPAPELLGGPSVFLFPPKPKDTLMISRTPEVTCVVVDVS |
| | | | HEDPEVKFNWYVDGVEVHNAKTKPCEEQYGSTYRCVSVLTVLHQDWLNGKEYKCKVSNKALP |
| | | | APIEKTISKAKGQPREPQVYTLPPSREEMTKNQVSLTCLVKGFYPSDIAVEWESNGQPENNY |
| | | | KTTPPVLDSDGSFFLYSKLTVDKSRWQQGNVFSCSVMHEALHNHYTQKSLSLSPGKGGGGSG |
| | | | GGGSGGGGSGGGGSGGGGSGGGGSDKTHTCPPCPAPELLGGPSVFLFPPKPKDTLMISRTPE |
| | | | VTCVVVDVSHEDPEVKFNWYVDGVEVHNAKTKPCEEQYGSTYRCVSVLTVLHQDWLNGKEYK |
| | | | CKVSNKALPAPIEKTISKAKGQPREPQVYTLPPSREEMTKNQVSLTCLVKGFYPSDIAVEWE |
| | | | SNGQPENNYKTTPPVLDSDGSFFLYSKLTVDKSRWQQGNVFSCSVMHEALHNHYTQKSLSLS |
| | | | PGK |
| 25 | X3S/VH | ARTIFICIAL | QVQLVQSGAEVKKPGASVKVSCKASGYTFTGYYVHWVRQAPGQCLEWMGWINPNSGATNYAQ |
| | | | KFQGRVTMTRDTSISTAYMELSRLRSDDTAVYYCVRDALIVEAPATRDYYYYGMDVWGQGTT |
| | | | VTVSS |
| 26 | X3S/VL | ARTIFICIAL | EIVLTQSPGTLSLSPGERATLSCRASQSVRSTYLAWYQQKPGQAPRLLIYGASSRATGIPDR |
| | | | FSGSGSGTDFTLTISRLEPEDFAVYYCQQYDASPITFGCGTRLEIK |
| 27 | X3S/CDR-H1 | ARTIFICIAL | GYYVH |
| 28 | X3S/CDR-H2 | ARTIFICIAL | WINPNSGATNYAQKFQG |
| 29 | X3S/CDR-H3 | ARTIFICIAL | DALIVEAPATRDYYYYGMDV |
| 30 | X3S/CDR-L1 | ARTIFICIAL | RASQSVRSTYLA |
| 31 | X3S/CDR-L2 | ARTIFICIAL | GASSRAT |
| 32 | X3S/CDR-L3 | ARTIFICIAL | QQYDASPIT |
| 33 | X3S/SCFV | ARTIFICIAL | QVQLVQSGAEVKKPGASVKVSCKASGYTFTGYYVHWVRQAPGQCLEWMGWINPNSGATNYAQ |
| | I2E | | KFQGRVTMTRDTSISTAYMELSRLRSDDTAVYYCVRDALIVEAPATRDYYYYGMDVWGQGTT |
| | | | VTVSSGGGGSGGGGSGGGGSEIVLTQSPGTLSLSPGERATLSCRASQSVRSTYLAWYQQKPG |
| | | | QAPRLLIYGASSRATGIPDRFSGSGSGTDFTLTISRLEPEDFAVYYCQQYDASPITFGCGTR |
| | | | LEIK |
| 34 | X3S/ | ARTIFICIAL | QVQLVQSGAEVKKPGASVKVSCKASGYTFTGYYVHWVRQAPGQCLEWMGWINPNSGATNYAQ |
| | BISPECIFIC | | KFQGRVTMTRDTSISTAYMELSRLRSDDTAVYYCVRDALIVEAPATRDYYYYGMDVWGQGTT |
| | MOL I2E | | VTVSSGGGGSGGGGSGGGGSEIVLTQSPGTLSLSPGERATLSCRASQSVRSTYLAWYQQKPG |
| | | | QAPRLLIYGASSRATGIPDRFSGSGSGTDFTLTISRLEPEDFAVYYCQQYDASPITFGCGTR |
| | | | LEIKSGGGGSEVQLVESGGGLVQPGGSLKLSCAASGFTFNKYAINWVRQAPGKGLEWVARIR |
| | | | SKYNNYATYYADAVKDRFTISRDDSKNTVYLQMNNLKTEDTAVYYCARAGNFGSSYISYWAY |
| | | | WGQGTLVTVSSGGGGSGGGGSGGGGSQTVVTQEPSLTVSPGGTVTITCGSSTGAVTSGNYPN |
| | | | WVQKKPGQAPRGLIGGTKFLAPGTPARFSGSLSGGKAALTLSGVQPEDEAEYYCVLWYSNRW |
| | | | VFGSGTKLTVL |
| 35 | X3S/HLE | ARTIFICIAL | QVQLVQSGAEVKKPGASVKVSCKASGYTFTGYYVHWVRQAPGQCLEWMGWINPNSGATNYAQ |
| | BITE I2E | | KFQGRVTMTRDTSISTAYMELSRLRSDDTAVYYCVRDALIVEAPATRDYYYYGMDVWGQGTT |
| | | | VTVSSGGGGSGGGGSGGGGSEIVLTQSPGTLSLSPGERATLSCRASQSVRSTYLAWYQQKPG |
| | | | QAPRLLIYGASSRATGIPDRFSGSGSGTDFTLTISRLEPEDFAVYYCQQYDASPITFGCGTR |
| | | | LEIKSGGGGSEVQLVESGGGLVQPGGSLKLSCAASGFTFNKYAINWVRQAPGKGLEWVARIR |
| | | | SKYNNYATYYADAVKDRFTISRDDSKNTVYLQMNNLKTEDTAVYYCARAGNFGSSYISYWAY |
| | | | WGQGTLVTVSSGGGGSGGGGSGGGGSQTVVTQEPSLTVSPGGTVTITCGSSTGAVTSGNYPN |
| | | | WVQKKPGQAPRGLIGGTKFLAPGTPARFSGSLSGGKAALTLSGVQPEDEAEYYCVLWYSNRW |
| | | | VFGSGTKLTVLGGGGDKTHTCPPCPAPELLGGPSVFLFPPKPKDTLMISRTPEVTCVVVDVS |
| | | | HEDPEVKFNWYVDGVEVHNAKTKPCEEQYGSTYRCVSVLTVLHQDWLNGKEYKCKVSNKALP |
| | | | APIEKTISKAKGQPREPQVYTLPPSREEMTKNQVSLTCLVKGFYPSDIAVEWESNGQPENNY |
| | | | KTTPPVLDSDGSFFLYSKLTVDKSRWQQGNVFSCSVMHEALHNHYTQKSLSLSPGKGGGGSG |
| | | | GGGSGGGGSGGGGSGGGGSGGGGSDKTHTCPPCPAPELLGGPSVFLFPPKPKDTLMISRTPE |
| | | | VTCVVVDVSHEDPEVKFNWYVDGVEVHNAKTKPCEEQYGSTYRCVSVLTVLHQDWLNGKEYK |
| | | | CKVSNKALPAPIEKTISKAKGQPREPQVYTLPPSREEMTKNQVSLTCLVKGFYPSDIAVEWE |
| | | | SNGQPENNYKTTPPVLDSDGSFFLYSKLTVDKSRWQQGNVFSCSVMHEALHNHYTQKSLSLS |
| | | | PGK |
| 36 | X3S/SCFV | ARTIFICIAL | QVQLVQSGAEVKKPGASVKVSCKASGYTFTGYYVHWVRQAPGQCLEWMGWINPNSGATNYAQ |
| | I2C | | KFQGRVTMTRDTSISTAYMELSRLRSDDTAVYYCVRDALIVEAPATRDYYYYGMDVWGQGTT |
| | | | VTVSSGGGGSGGGGSGGGGSEIVLTQSPGTLSLSPGERATLSCRASQSVRSTYLAWYQQKPG |
| | | | QAPRLLIYGASSRATGIPDRFSGSGSGTDFTLTISRLEPEDFAVYYCQQYDASPITFGCGTR |
| | | | LEIK |
| 37 | X3S/ | ARTIFICIAL | QVQLVQSGAEVKKPGASVKVSCKASGYTFTGYYVHWVRQAPGQCLEWMGWINPNSGATNYAQ |
| | BISPECIFIC | | KFQGRVTMTRDTSISTAYMELSRLRSDDTAVYYCVRDALIVEAPATRDYYYYGMDVWGQGTT |
| | MOL I2C | | VTVSSGGGGSGGGGSGGGGSEIVLTQSPGTLSLSPGERATLSCRASQSVRSTYLAWYQQKPG |
| | | | QAPRLLIYGASSRATGIPDRFSGSGSGTDFTLTISRLEPEDFAVYYCQQYDASPITFGCGTR |
| | | | LEIKSGGGGSEVQLVESGGGLVQPGGSLKLSCAASGFTFNKYAMNWVRQAPGKGLEWVARIR |
| | | | SKYNNYATYYADSVKDRFTISRDDSKNTAYLQMNNLKTEDTAVYYCVRHGNFGNSYISYWAY |
| | | | WGQGTLVTVSSGGGGSGGGGSGGGGSQTVVTQEPSLTVSPGGTVTLTCGSSTGAVTSGNYPN |
| | | | WVQQKPGQAPRGLIGGTKFLAPGTPARFSGSLLGGKAALTLSGVQPEDEAEYYCVLWYSNRW |
| | | | VFGGGTKLTVL |
| 38 | X3S/HLE | ARTIFICIAL | QVQLVQSGAEVKKPGASVKVSCKASGYTFTGYYVHWVRQAPGQCLEWMGWINPNSGATNYAQ |
| | BITE I2C | | KFQGRVTMTRDTSISTAYMELSRLRSDDTAVYYCVRDALIVEAPATRDYYYYGMDVWGQGTT |
| | | | VTVSSGGGGSGGGGSGGGGSEIVLTQSPGTLSLSPGERATLSCRASQSVRSTYLAWYQQKPG |
| | | | QAPRLLIYGASSRATGIPDRFSGSGSGTDFTLTISRLEPEDFAVYYCQQYDASPITFGCGTR |
| | | | LEIKSGGGGSEVQLVESGGGLVQPGGSLKLSCAASGFTFNKYAMNWVRQAPGKGLEWVARIR |
| | | | SKYNNYATYYADSVKDRFTISRDDSKNTAYLQMNNLKTEDTAVYYCVRHGNFGNSYISYWAY |
| | | | WGQGTLVTVSSGGGGSGGGGSGGGGSQTVVTQEPSLTVSPGGTVTLTCGSSTGAVTSGNYPN |
| | | | WVQQKPGQAPRGLIGGTKFLAPGTPARFSGSLLGGKAALTLSGVQPEDEAEYYCVLWYSNRW |
| | | | VFGGGTKLTVLGGGGDKTHTCPPCPAPELLGGPSVFLFPPKPKDTLMISRTPEVTCVVVDVS |
| | | | HEDPEVKFNWYVDGVEVHNAKTKPCEEQYGSTYRCVSVLTVLHQDWLNGKEYKCKVSNKALP |
| | | | APIEKTISKAKGQPREPQVYTLPPSREEMTKNQVSLTCLVKGFYPSDIAVEWESNGQPENNY |
| | | | KTTPPVLDSDGSFFLYSKLTVDKSRWQQGNVFSCSVMHEALHNHYTQKSLSLSPGKGGGGSG |
| | | | GGGSGGGGSGGGGSGGGGSGGGGSDKTHTCPPCPAPELLGGPSVFLFPPKPKDTLMISRTPE |
| | | | VTCVVVDVSHEDPEVKFNWYVDGVEVHNAKTKPCEEQYGSTYRCVSVLTVLHQDWLNGKEYK |
| | | | CKVSNKALPAPIEKTISKAKGQPREPQVYTLPPSREEMTKNQVSLTCLVKGFYPSDIAVEWE |
| | | | SNGQPENNYKTTPPVLDSDGSFFLYSKLTVDKSRWQQGNVFSCSVMHEALHNHYTQKSLSLS |
| | | | PGK |
| 39 | L4B/VH | ARTIFICIAL | QVQLVQSGAEVKKPGASVKVSCKASGYTFTGYYVHWVRQAPGQCLEWMGWINPNSGATNYAQ |
| | | | KFQGRVTMTRDTSISTAYMELSRLRSDDTAVYYCVRDRLIVEAPATRDYYYYGMDVWGQGTT |
| | | | VTVSS |
| 40 | L4B/VL | ARTIFICIAL | EIVLTQSPGTLSLSPGERATLSCRASQSVRSTYLAWYQQKPGQAPRLLIYGASSRATGIPDR |
| | | | FSGSGSGTDFTLTISRLEPEDFAVYYCQQYDASPITFGCGTRLEIK |
| 41 | L4B/CDR-H1 | ARTIFICIAL | GYYVH |
| 42 | L4B/CDR-H2 | ARTIFICIAL | WINPNSGATNYAQKFQG |
| 43 | L4B/CDR-H3 | ARTIFICIAL | DRLIVEAPATRDYYYYGMDV |
| 44 | L4B/CDR-L1 | ARTIFICIAL | RASQSVRSTYLA |
| 45 | L4B/CDR-L2 | ARTIFICIAL | GASSRAT |
| 46 | L4B/CDR-L3 | ARTIFICIAL | QQYDASPIT |
| 47 | L4B/SCFV | ARTIFICIAL | QVQLVQSGAEVKKPGASVKVSCKASGYTFTGYYVHWVRQAPGQCLEWMGWINPNSGATNYAQ |
| | I2E | | KFQGRVTMTRDTSISTAYMELSRLRSDDTAVYYCVRDRLIVEAPATRDYYYYGMDVWGQGTT |
| | | | VTVSSGGGGSGGGGSGGGGSEIVLTQSPGTLSLSPGERATLSCRASQSVRSTYLAWYQQKPG |
| | | | QAPRLLIYGASSRATGIPDRFSGSGSGTDFTLTISRLEPEDFAVYYCQQYDASPITFGCGTR |
| | | | LEIK |
| 48 | L4B/ | ARTIFICIAL | QVQLVQSGAEVKKPGASVKVSCKASGYTFTGYYVHWVRQAPGQCLEWMGWINPNSGATNYAQ |
| | BISPECIFIC | | KFQGRVTMTRDTSISTAYMELSRLRSDDTAVYYCVRDRLIVEAPATRDYYYYGMDVWGQGTT |
| | MOL I2E | | VTVSSGGGGSGGGGSGGGGSEIVLTQSPGTLSLSPGERATLSCRASQSVRSTYLAWYQQKPG |
| | | | QAPRLLIYGASSRATGIPDRFSGSGSGTDFTLTISRLEPEDFAVYYCQQYDASPITFGCGTR |
| | | | LEIKSGGGGSEVQLVESGGGLVQPGGSLKLSCAASGFTFNKYAINWVRQAPGKGLEWVARIR |
| | | | SKYNNYATYYADAVKDRFTISRDDSKNTVYLQMNNLKTEDTAVYYCARAGNFGSSYISYWAY |
| | | | WGQGTLVTVSSGGGGSGGGGSGGGGSQTVVTQEPSLTVSPGGTVTITCGSSTGAVTSGNYPN |
| | | | WVQKKPGQAPRGLIGGTKFLAPGTPARFSGSLSGGKAALTLSGVQPEDEAEYYCVLWYSNRW |
| | | | VFGSGTKLTVL |
| 49 | L4B/HLE | ARTIFICIAL | QVQLVQSGAEVKKPGASVKVSCKASGYTFTGYYVHWVRQAPGQCLEWMGWINPNSGATNYAQ |
| | BITE I2E | | KFQGRVTMTRDTSISTAYMELSRLRSDDTAVYYCVRDRLIVEAPATRDYYYYGMDVWGQGTT |
| | | | VTVSSGGGGSGGGGSGGGGSEIVLTQSPGTLSLSPGERATLSCRASQSVRSTYLAWYQQKPG |
| | | | QAPRLLIYGASSRATGIPDRFSGSGSGTDFTLTISRLEPEDFAVYYCQQYDASPITFGCGTR |
| | | | LEIKSGGGGSEVQLVESGGGLVQPGGSLKLSCAASGFTFNKYAINWVRQAPGKGLEWVARIR |
| | | | SKYNNYATYYADAVKDRFTISRDDSKNTVYLQMNNLKTEDTAVYYCARAGNFGSSYISYWAY |
| | | | WGQGTLVTVSSGGGGSGGGGSGGGGSQTVVTQEPSLTVSPGGTVTITCGSSTGAVTSGNYPN |
| | | | WVQKKPGQAPRGLIGGTKFLAPGTPARFSGSLSGGKAALTLSGVQPEDEAEYYCVLWYSNRW |
| | | | VFGSGTKLTVLGGGGDKTHTCPPCPAPELLGGPSVFLFPPKPKDTLMISRTPEVTCVVVDVS |
| | | | HEDPEVKFNWYVDGVEVHNAKTKPCEEQYGSTYRCVSVLTVLHQDWLNGKEYKCKVSNKALP |
| | | | APIEKTISKAKGQPREPQVYTLPPSREEMTKNQVSLTCLVKGFYPSDIAVEWESNGQPENNY |
| | | | KTTPPVLDSDGSFFLYSKLTVDKSRWQQGNVFSCSVMHEALHNHYTQKSLSLSPGKGGGGSG |
| | | | GGGSGGGGSGGGGSGGGGSGGGGSDKTHTCPPCPAPELLGGPSVFLFPPKPKDTLMISRTPE |
| | | | VTCVVVDVSHEDPEVKFNWYVDGVEVHNAKTKPCEEQYGSTYRCVSVLTVLHQDWLNGKEYK |
| | | | CKVSNKALPAPIEKTISKAKGQPREPQVYTLPPSREEMTKNQVSLTCLVKGFYPSDIAVEWE |
| | | | SNGQPENNYKTTPPVLDSDGSFFLYSKLTVDKSRWQQGNVFSCSVMHEALHNHYTQKSLSLS |
| | | | PGK |
| 50 | L4B/SCFV | ARTIFICIAL | QVQLVQSGAEVKKPGASVKVSCKASGYTFTGYYVHWVRQAPGQCLEWMGWINPNSGATNYAQ |
| | I2C | | KFQGRVTMTRDTSISTAYMELSRLRSDDTAVYYCVRDRLIVEAPATRDYYYYGMDVWGQGTT |
| | | | VTVSSGGGGSGGGGSGGGGSEIVLTQSPGTLSLSPGERATLSCRASQSVRSTYLAWYQQKPG |
| | | | QAPRLLIYGASSRATGIPDRFSGSGSGTDFTLTISRLEPEDFAVYYCQQYDASPITFGCGTR |
| | | | LEIK |
| 51 | L4B/ | ARTIFICIAL | QVQLVQSGAEVKKPGASVKVSCKASGYTFTGYYVHWVRQAPGQCLEWMGWINPNSGATNYAQ |
| | BISPECIFIC | | KFQGRVTMTRDTSISTAYMELSRLRSDDTAVYYCVRDRLIVEAPATRDYYYYGMDVWGQGTT |
| | MOL I2C | | VTVSSGGGGSGGGGSGGGGSEIVLTQSPGTLSLSPGERATLSCRASQSVRSTYLAWYQQKPG |
| | | | QAPRLLIYGASSRATGIPDRFSGSGSGTDFTLTISRLEPEDFAVYYCQQYDASPITFGCGTR |
| | | | LEIKSGGGGSEVQLVESGGGLVQPGGSLKLSCAASGFTFNKYAMNWVRQAPGKGLEWVARIR |
| | | | SKYNNYATYYADSVKDRFTISRDDSKNTAYLQMNNLKTEDTAVYYCVRHGNFGNSYISYWAY |
| | | | WGQGTLVTVSSGGGGSGGGGSGGGGSQTVVTQEPSLTVSPGGTVTLTCGSSTGAVTSGNYPN |
| | | | WVQQKPGQAPRGLIGGTKFLAPGTPARFSGSLLGGKAALTLSGVQPEDEAEYYCVLWYSNRW |
| | | | VFGGGTKLTVL |
| 52 | L4B/HLE | ARTIFICIAL | QVQLVQSGAEVKKPGASVKVSCKASGYTFTGYYVHWVRQAPGQCLEWMGWINPNSGATNYAQ |
| | BITE I2C | | KFQGRVTMTRDTSISTAYMELSRLRSDDTAVYYCVRDRLIVEAPATRDYYYYGMDVWGQGTT |
| | | | VTVSSGGGGSGGGGSGGGGSEIVLTQSPGTLSLSPGERATLSCRASQSVRSTYLAWYQQKPG |
| | | | QAPRLLIYGASSRATGIPDRFSGSGSGTDFTLTISRLEPEDFAVYYCQQYDASPITFGCGTR |
| | | | LEIKSGGGGSEVQLVESGGGLVQPGGSLKLSCAASGFTFNKYAMNWVRQAPGKGLEWVARIR |
| | | | SKYNNYATYYADSVKDRFTISRDDSKNTAYLQMNNLKTEDTAVYYCVRHGNFGNSYISYWAY |
| | | | WGQGTLVTVSSGGGGSGGGGSGGGGSQTVVTQEPSLTVSPGGTVTLTCGSSTGAVTSGNYPN |
| | | | WVQQKPGQAPRGLIGGTKFLAPGTPARFSGSLLGGKAALTLSGVQPEDEAEYYCVLWYSNRW |
| | | | VFGGGTKLTVLGGGGDKTHTCPPCPAPELLGGPSVFLFPPKPKDTLMISRTPEVTCVVVDVS |
| | | | HEDPEVKFNWYVDGVEVHNAKTKPCEEQYGSTYRCVSVLTVLHQDWLNGKEYKCKVSNKALP |
| | | | APIEKTISKAKGQPREPQVYTLPPSREEMTKNQVSLTCLVKGFYPSDIAVEWESNGQPENNY |
| | | | KTTPPVLDSDGSFFLYSKLTVDKSRWQQGNVFSCSVMHEALHNHYTQKSLSLSPGKGGGGSG |
| | | | GGGSGGGGSGGGGSGGGGSGGGGSDKTHTCPPCPAPELLGGPSVFLFPPKPKDTLMISRTPE |
| | | | VTCVVVDVSHEDPEVKFNWYVDGVEVHNAKTKPCEEQYGSTYRCVSVLTVLHQDWLNGKEYK |
| | | | CKVSNKALPAPIEKTISKAKGQPREPQVYTLPPSREEMTKNQVSLTCLVKGFYPSDIAVEWE |
| | | | SNGQPENNYKTTPPVLDSDGSFFLYSKLTVDKSRWQQGNVFSCSVMHEALHNHYTQKSLSLS |
| | | | PGK |
| 53 | I2P/VH | ARTIFICIAL | QVQLVQSGAEVKKPGASVKVSCKASGYTFTGYYVHWVRQAPGQCLEWMGWINPNSGATNYAQ |
| | | | KFQGRVTMTRDTSISTAYMELSRLRSVDTAVYYCVRDALIVEAPATRDYYYYGMDVWGQGTT |
| | | | VTVSS |
| 54 | I2P/VL | ARTIFICIAL | EIVLTQSPGTLSLSPGERATLSCRASQSVRSTYLAWYQQKPGQAPRLLISGASSRATGIPDR |
| | | | FSGSGSGTDFTLTISRLEPEDFAVYYCQQYDASPITFGCGTRLEIKS |
| 55 | I2P/CDR-H1 | ARTIFICIAL | GYYVH |
| 56 | I2P/CDR-H2 | ARTIFICIAL | WINPNSGATNYAQKFQG |
| 57 | I2P/CDR-H3 | ARTIFICIAL | DALIVEAPATRDYYYYGMDV |
| 58 | I2P/CDR-L1 | ARTIFICIAL | RASQSVRSTYLA |
| 59 | I2P/CDR-L2 | ARTIFICIAL | GASSRAT |
| 60 | I2P/CDR-L3 | ARTIFICIAL | QQYDASPIT |
| 61 | I2P/SCFV | ARTIFICIAL | QVQLVQSGAEVKKPGASVKVSCKASGYTFTGYYVHWVRQAPGQCLEWMGWINPNSGATNYAQ |
| | I2E | | KFQGRVTMTRDTSISTAYMELSRLRSVDTAVYYCVRDALIVEAPATRDYYYYGMDVWGQGTT |
| | | | VTVSSGGGGSGGGGSGGGGSEIVLTQSPGTLSLSPGERATLSCRASQSVRSTYLAWYQQKPG |
| | | | QAPRLLISGASSRATGIPDRFSGSGSGTDFTLTISRLEPEDFAVYYCQQYDASPITFGCGTR |
| | | | LEIKS |
| 62 | I2P/ | ARTIFICIAL | QVQLVQSGAEVKKPGASVKVSCKASGYTFTGYYVHWVRQAPGQCLEWMGWINPNSGATNYAQ |
| | BISPECIFIC | | KFQGRVTMTRDTSISTAYMELSRLRSVDTAVYYCVRDALIVEAPATRDYYYYGMDVWGQGTT |
| | MOL I2E | | VTVSSGGGGSGGGGSGGGGSEIVLTQSPGTLSLSPGERATLSCRASQSVRSTYLAWYQQKPG |
| | | | QAPRLLISGASSRATGIPDRFSGSGSGTDFTLTISRLEPEDFAVYYCQQYDASPITFGCGTR |
| | | | LEIKSSGGGGSEVQLVESGGGLVQPGGSLKLSCAASGFTFNKYAINWVRQAPGKGLEWVARI |
| | | | RSKYNNYATYYADAVKDRFTISRDDSKNTVYLQMNNLKTEDTAVYYCARAGNFGSSYISYWA |
| | | | YWGQGTLVTVSSGGGGSGGGGSGGGGSQTVVTQEPSLTVSPGGTVTITCGSSTGAVTSGNYP |
| | | | NWVQKKPGQAPRGLIGGTKFLAPGTPARFSGSLSGGKAALTLSGVQPEDEAEYYCVLWYSNR |
| | | | WVFGSGTKLTVL |
| 63 | I2P/HLE | ARTIFICIAL | QVQLVQSGAEVKKPGASVKVSCKASGYTFTGYYVHWVRQAPGQCLEWMGWINPNSGATNYAQ |
| | BITE I2E | | KFQGRVTMTRDTSISTAYMELSRLRSVDTAVYYCVRDALIVEAPATRDYYYYGMDVWGQGTT |
| | | | VTVSSGGGGSGGGGSGGGGSEIVLTQSPGTLSLSPGERATLSCRASQSVRSTYLAWYQQKPG |
| | | | QAPRLLISGASSRATGIPDRFSGSGSGTDFTLTISRLEPEDFAVYYCQQYDASPITFGCGTR |
| | | | LEIKSSGGGGSEVQLVESGGGLVQPGGSLKLSCAASGFTFNKYAINWVRQAPGKGLEWVARI |
| | | | RSKYNNYATYYADAVKDRFTISRDDSKNTVYLQMNNLKTEDTAVYYCARAGNFGSSYISYWA |
| | | | YWGQGTLVTVSSGGGGSGGGGSGGGGSQTVVTQEPSLTVSPGGTVTITCGSSTGAVTSGNYP |
| | | | NWVQKKPGQAPRGLIGGTKFLAPGTPARFSGSLSGGKAALTLSGVQPEDEAEYYCVLWYSNR |
| | | | WVFGSGTKLTVLGGGGDKTHTCPPCPAPELLGGPSVFLFPPKPKDTLMISRTPEVTCVVVDV |
| | | | SHEDPEVKFNWYVDGVEVHNAKTKPCEEQYGSTYRCVSVLTVLHQDWLNGKEYKCKVSNKAL |
| | | | PAPIEKTISKAKGQPREPQVYTLPPSREEMTKNQVSLTCLVKGFYPSDIAVEWESNGQPENN |
| | | | YKTTPPVLDSDGSFFLYSKLTVDKSRWQQGNVFSCSVMHEALHNHYTQKSLSLSPGKGGGGS |
| | | | GGGGSGGGGSGGGGSGGGGSGGGGSDKTHTCPPCPAPELLGGPSVFLFPPKPKDTLMISRTP |
| | | | EVTCVVVDVSHEDPEVKFNWYVDGVEVHNAKTKPCEEQYGSTYRCVSVLTVLHQDWLNGKEY |
| | | | KCKVSNKALPAPIEKTISKAKGQPREPQVYTLPPSREEMTKNQVSLTCLVKGFYPSDIAVEW |
| | | | ESNGQPENNYKTTPPVLDSDGSFFLYSKLTVDKSRWQQGNVFSCSVMHEALHNHYTQKSLSL |
| | | | SPGK |
| 64 | I2P/SCFV | ARTIFICIAL | QVQLVQSGAEVKKPGASVKVSCKASGYTFTGYYVHWVRQAPGQCLEWMGWINPNSGATNYAQ |
| | I2C | | KFQGRVTMTRDTSISTAYMELSRLRSVDTAVYYCVRDALIVEAPATRDYYYYGMDVWGQGTT |
| | | | VTVSSGGGGSGGGGSGGGGSEIVLTQSPGTLSLSPGERATLSCRASQSVRSTYLAWYQQKPG |
| | | | QAPRLLISGASSRATGIPDRFSGSGSGTDFTLTISRLEPEDFAVYYCQQYDASPITFGCGTR |
| | | | LEIK |
| 65 | I2P 1 | ARTIFICIAL | QVQLVQSGAEVKKPGASVKVSCKASGYTFTGYYVHWVRQAPGQCLEWMGWINPNSGATNYAQ |
| | BISPECIFIC | | KFQGRVTMTRDTSISTAYMELSRLRSVDTAVYYCVRDALIVEAPATRDYYYYGMDVWGQGTT |
| | MOL I2C | | VTVSSGGGGSGGGGSGGGGSEIVLTQSPGTLSLSPGERATLSCRASQSVRSTYLAWYQQKPG |
| | | | QAPRLLISGASSRATGIPDRFSGSGSGTDFTLTISRLEPEDFAVYYCQQYDASPITFGCGTR |
| | | | LEIKSGGGGSEVQLVESGGGLVQPGGSLKLSCAASGFTFNKYAMNWVRQAPGKGLEWVARIR |
| | | | SKYNNYATYYADSVKDRFTISRDDSKNTAYLQMNNLKTEDTAVYYCVRHGNFGNSYISYWAY |
| | | | WGQGTLVTVSSGGGGSGGGGSGGGGSQTVVTQEPSLTVSPGGTVTLTCGSSTGAVTSGNYPN |
| | | | WVQQKPGQAPRGLIGGTKFLAPGTPARFSGSLLGGKAALTLSGVQPEDEAEYYCVLWYSNRW |
| | | | VFGGGTKLTVL |
| 66 | I2P/HLE | ARTIFICIAL | QVQLVQSGAEVKKPGASVKVSCKASGYTFTGYYVHWVRQAPGQCLEWMGWINPNSGATNYAQ |
| | BITE I2C | | KFQGRVTMTRDTSISTAYMELSRLRSVDTAVYYCVRDALIVEAPATRDYYYYGMDVWGQGTT |
| | | | VTVSSGGGGSGGGGSGGGGSEIVLTQSPGTLSLSPGERATLSCRASQSVRSTYLAWYQQKPG |
| | | | QAPRLLISGASSRATGIPDRFSGSGSGTDFTLTISRLEPEDFAVYYCQQYDASPITFGCGTR |
| | | | LEIKSGGGGSEVQLVESGGGLVQPGGSLKLSCAASGFTFNKYAMNWVRQAPGKGLEWVARIR |
| | | | SKYNNYATYYADSVKDRFTISRDDSKNTAYLQMNNLKTEDTAVYYCVRHGNFGNSYISYWAY |
| | | | WGQGTLVTVSSGGGGSGGGGSGGGGSQTVVTQEPSLTVSPGGTVTLTCGSSTGAVTSGNYPN |
| | | | WVQQKPGQAPRGLIGGTKFLAPGTPARFSGSLLGGKAALTLSGVQPEDEAEYYCVLWYSNRW |
| | | | VFGGGTKLTVLGGGGDKTHTCPPCPAPELLGGPSVFLFPPKPKDTLMISRTPEVTCVVVDVS |
| | | | HEDPEVKFNWYVDGVEVHNAKTKPCEEQYGSTYRCVSVLTVLHQDWLNGKEYKCKVSNKALP |
| | | | APIEKTISKAKGQPREPQVYTLPPSREEMTKNQVSLTCLVKGFYPSDIAVEWESNGQPENNY |
| | | | KTTPPVLDSDGSFFLYSKLTVDKSRWQQGNVFSCSVMHEALHNHYTQKSLSLSPGKGGGGSG |
| | | | GGGSGGGGSGGGGSGGGGSGGGGSDKTHTCPPCPAPELLGGPSVFLFPPKPKDTLMISRTPE |
| | | | VTCVVVDVSHEDPEVKFNWYVDGVEVHNAKTKPCEEQYGSTYRCVSVLTVLHQDWLNGKEYK |
| | | | CKVSNKALPAPIEKTISKAKGQPREPQVYTLPPSREEMTKNQVSLTCLVKGFYPSDIAVEWE |
| | | | SNGQPENNYKTTPPVLDSDGSFFLYSKLTVDKSRWQQGNVFSCSVMHEALHNHYTQKSLSLS |
| | | | PGK |
| 67 | S3N/VH | ARTIFICIAL | QVQLVQSGAEVKKPGASVKVSCKASGYTFTGYYVHWVRQAPGQCLEWMGWINPNSGATNYAQ |
| | | | KFQGRVTMTRDTSISTAYMELSRLRSVDTAVYYCVRDALIVEAPATRDYYYYGMDVWGQGTT |
| | | | VTVSS |
| 68 | S3N/VL | ARTIFICIAL | EIVLTQSPGTLSLSPGERATLSCRASQSVRSTYLAWYQQKPGQAPRLLISGASSRATGIPDR |
| | | | FSGSGSGTDFTLTISRLEPEDFAVYYCQQYQTSPITFGCGTRLEIK |
| 69 | S3N/CDR-H1 | ARTIFICIAL | GYYVH |
| 70 | S3N/CDR-H2 | ARTIFICIAL | WINPNSGATNYAQKFQG |
| 71 | S3N/CDR-H3 | ARTIFICIAL | DALIVEAPATRDYYYYGMDV |
| 72 | S3N/CDR-L1 | ARTIFICIAL | RASQSVRSTYLA |
| 73 | S3N/CDR-L2 | ARTIFICIAL | GASSRAT |
| 74 | S3N/CDR-L3 | ARTIFICIAL | QQYQTSPIT |
| 75 | S3N/SCFV | ARTIFICIAL | QVQLVQSGAEVKKPGASVKVSCKASGYTFTGYYVHWVRQAPGQCLEWMGWINPNSGATNYAQ |
| | I2E | | KFQGRVTMTRDTSISTAYMELSRLRSVDTAVYYCVRDALIVEAPATRDYYYYGMDVWGQGTT |
| | | | VTVSSGGGGSGGGGSGGGGSEIVLTQSPGTLSLSPGERATLSCRASQSVRSTYLAWYQQKPG |
| | | | QAPRLLISGASSRATGIPDRFSGSGSGTDFTLTISRLEPEDFAVYYCQQYQTSPITFGCGTR |
| | | | LEIK |
| 76 | S3N/ | ARTIFICIAL | QVQLVQSGAEVKKPGASVKVSCKASGYTFTGYYVHWVRQAPGQCLEWMGWINPNSGATNYAQ |
| | BISPECIFIC | | KFQGRVTMTRDTSISTAYMELSRLRSVDTAVYYCVRDALIVEAPATRDYYYYGMDVWGQGTT |
| | MOL I2E | | VTVSSGGGGSGGGGSGGGGSEIVLTQSPGTLSLSPGERATLSCRASQSVRSTYLAWYQQKPG |
| | | | QAPRLLISGASSRATGIPDRFSGSGSGTDFTLTISRLEPEDFAVYYCQQYQTSPITFGCGTR |
| | | | LEIKSGGGGSEVQLVESGGGLVQPGGSLKLSCAASGFTFNKYAINWVRQAPGKGLEWVARIR |
| | | | SKYNNYATYYADAVKDRFTISRDDSKNTVYLQMNNLKTEDTAVYYCARAGNFGSSYISYWAY |
| | | | WGQGTLVTVSSGGGGSGGGGSGGGGSQTVVTQEPSLTVSPGGTVTITCGSSTGAVTSGNYPN |
| | | | WVQKKPGQAPRGLIGGTKFLAPGTPARFSGSLSGGKAALTLSGVQPEDEAEYYCVLWYSNRW |
| | | | VFGSGTKLTVL |
| 77 | S3N/HLE | ARTIFICIAL | QVQLVQSGAEVKKPGASVKVSCKASGYTFTGYYVHWVRQAPGQCLEWMGWINPNSGATNYAQ |
| | BITE I2E | | KFQGRVTMTRDTSISTAYMELSRLRSVDTAVYYCVRDALIVEAPATRDYYYYGMDVWGQGTT |
| | | | VTVSSGGGGSGGGGSGGGGSEIVLTQSPGTLSLSPGERATLSCRASQSVRSTYLAWYQQKPG |
| | | | QAPRLLISGASSRATGIPDRFSGSGSGTDFTLTISRLEPEDFAVYYCQQYQTSPITFGCGTR |
| | | | LEIKSGGGGSEVQLVESGGGLVQPGGSLKLSCAASGFTFNKYAINWVRQAPGKGLEWVARIR |
| | | | SKYNNYATYYADAVKDRFTISRDDSKNTVYLQMNNLKTEDTAVYYCARAGNFGSSYISYWAY |
| | | | WGQGTLVTVSSGGGGSGGGGSGGGGSQTVVTQEPSLTVSPGGTVTITCGSSTGAVTSGNYPN |
| | | | WVQKKPGQAPRGLIGGTKFLAPGTPARFSGSLSGGKAALTLSGVQPEDEAEYYCVLWYSNRW |
| | | | VFGSGTKLTVLGGGGDKTHTCPPCPAPELLGGPSVFLFPPKPKDTLMISRTPEVTCVVVDVS |
| | | | HEDPEVKFNWYVDGVEVHNAKTKPCEEQYGSTYRCVSVLTVLHQDWLNGKEYKCKVSNKALP |
| | | | APIEKTISKAKGQPREPQVYTLPPSREEMTKNQVSLTCLVKGFYPSDIAVEWESNGQPENNY |
| | | | KTTPPVLDSDGSFFLYSKLTVDKSRWQQGNVFSCSVMHEALHNHYTQKSLSLSPGKGGGGSG |
| | | | GGGSGGGGSGGGGSGGGGSGGGGSDKTHTCPPCPAPELLGGPSVFLFPPKPKDTLMISRTPE |
| | | | VTCVVVDVSHEDPEVKFNWYVDGVEVHNAKTKPCEEQYGSTYRCVSVLTVLHQDWLNGKEYK |
| | | | CKVSNKALPAPIEKTISKAKGQPREPQVYTLPPSREEMTKNQVSLTCLVKGFYPSDIAVEWE |
| | | | SNGQPENNYKTTPPVLDSDGSFFLYSKLTVDKSRWQQGNVFSCSVMHEALHNHYTQKSLSLS |
| | | | PGK |
| 78 | S3N/SCFV | ARTIFICIAL | QVQLVQSGAEVKKPGASVKVSCKASGYTFTGYYVHWVRQAPGQCLEWMGWINPNSGATNYAQ |
| | I2C | | KFQGRVTMTRDTSISTAYMELSRLRSVDTAVYYCVRDALIVEAPATRDYYYYGMDVWGQGTT |
| | | | VTVSSGGGGSGGGGSGGGGSEIVLTQSPGTLSLSPGERATLSCRASQSVRSTYLAWYQQKPG |
| | | | QAPRLLISGASSRATGIPDRFSGSGSGTDFTLTISRLEPEDFAVYYCQQYQTSPITFGCGTR |
| | | | LEIK |
| 79 | S3N/ | ARTIFICIAL | QVQLVQSGAEVKKPGASVKVSCKASGYTFTGYYVHWVRQAPGQCLEWMGWINPNSGATNYAQ |
| | BISPECIFIC | | KFQGRVTMTRDTSISTAYMELSRLRSVDTAVYYCVRDALIVEAPATRDYYYYGMDVWGQGTT |
| | MOL I2C | | VTVSSGGGGSGGGGSGGGGSEIVLTQSPGTLSLSPGERATLSCRASQSVRSTYLAWYQQKPG |
| | | | QAPRLLISGASSRATGIPDRFSGSGSGTDFTLTISRLEPEDFAVYYCQQYQTSPITFGCGTR |
| | | | LEIKSGGGGSEVQLVESGGGLVQPGGSLKLSCAASGFTFNKYAMNWVRQAPGKGLEWVARIR |
| | | | SKYNNYATYYADSVKDRFTISRDDSKNTAYLQMNNLKTEDTAVYYCVRHGNFGNSYISYWAY |
| | | | WGQGTLVTVSSGGGGSGGGGSGGGGSQTVVTQEPSLTVSPGGTVTLTCGSSTGAVTSGNYPN |
| | | | WVQQKPGQAPRGLIGGTKFLAPGTPARFSGSLLGGKAALTLSGVQPEDEAEYYCVLWYSNRW |
| | | | VFGGGTKLTVL |
| 80 | S3N/HLE | ARTIFICIAL | QVQLVQSGAEVKKPGASVKVSCKASGYTFTGYYVHWVRQAPGQCLEWMGWINPNSGATNYAQ |
| | BITE I2C | | KFQGRVTMTRDTSISTAYMELSRLRSVDTAVYYCVRDALIVEAPATRDYYYYGMDVWGQGTT |
| | | | VTVSSGGGGSGGGGSGGGGSEIVLTQSPGTLSLSPGERATLSCRASQSVRSTYLAWYQQKPG |
| | | | QAPRLLISGASSRATGIPDRFSGSGSGTDFTLTISRLEPEDFAVYYCQQYQTSPITFGCGTR |
| | | | LEIKSGGGGSEVQLVESGGGLVQPGGSLKLSCAASGFTFNKYAMNWVRQAPGKGLEWVARIR |
| | | | SKYNNYATYYADSVKDRFTISRDDSKNTAYLQMNNLKTEDTAVYYCVRHGNFGNSYISYWAY |
| | | | WGQGTLVTVSSGGGGSGGGGSGGGGSQTVVTQEPSLTVSPGGTVTLTCGSSTGAVTSGNYPN |
| | | | WVQQKPGQAPRGLIGGTKFLAPGTPARFSGSLLGGKAALTLSGVQPEDEAEYYCVLWYSNRW |
| | | | VFGGGTKLTVLGGGGDKTHTCPPCPAPELLGGPSVFLFPPKPKDTLMISRTPEVTCVVVDVS |
| | | | HEDPEVKFNWYVDGVEVHNAKTKPCEEQYGSTYRCVSVLTVLHQDWLNGKEYKCKVSNKALP |
| | | | APIEKTISKAKGQPREPQVYTLPPSREEMTKNQVSLTCLVKGFYPSDIAVEWESNGQPENNY |
| | | | KTTPPVLDSDGSFFLYSKLTVDKSRWQQGNVFSCSVMHEALHNHYTQKSLSLSPGKGGGGSG |
| | | | GGGSGGGGSGGGGSGGGGSGGGGSDKTHTCPPCPAPELLGGPSVFLFPPKPKDTLMISRTPE |
| | | | VTCVVVDVSHEDPEVKFNWYVDGVEVHNAKTKPCEEQYGSTYRCVSVLTVLHQDWLNGKEYK |
| | | | CKVSNKALPAPIEKTISKAKGQPREPQVYTLPPSREEMTKNQVSLTCLVKGFYPSDIAVEWE |
| | | | SNGQPENNYKTTPPVLDSDGSFFLYSKLTVDKSRWQQGNVFSCSVMHEALHNHYTQKSLSLS |
| | | | PGK |
| 81 | H7I/VH | ARTIFICIAL | QVQLVQSGAEVKKPGASVKVSCKASGYTFTGYYVHWVRQAPGQCLEWMGWINPNSGATNYAQ |
| | | | KFQGRVTMTRDTSISTAYMELSRLRSVDTAVYYCVRDRLIVEAPATRDYYYYGMDVWGQGTT |
| | | | VTVSS |
| 82 | H7I/VL | ARTIFICIAL | EIVLTQSPGTLSLSPGERATLSCRASQSVRSTYLAWYQQTPGQAPRLLISGASSRATGIPDR |
| | | | FSGSGSGTDFILTISRLEPEDFAVYYCQQYDASPITFGCGTRLEIK |
| 83 | H7I/CDR-H1 | ARTIFICIAL | GYYVH |
| 84 | H7I/CDR-H2 | ARTIFICIAL | WINPNSGATNYAQKFQG |
| 85 | H7I/CDR-H3 | ARTIFICIAL | DRLIVEAPATRDYYYYGMDV |
| 86 | H7I/CDR-L1 | ARTIFICIAL | RASQSVRSTYLA |
| 87 | H7I/CDR-L2 | ARTIFICIAL | GASSRAT |
| 88 | H7I/CDR-L3 | ARTIFICIAL | QQYDASPIT |
| 89 | H7I/SCFV | ARTIFICIAL | QVQLVQSGAEVKKPGASVKVSCKASGYTFTGYYVHWVRQAPGQCLEWMGWINPNSGATNYAQ |
| | I2E | | KFQGRVTMTRDTSISTAYMELSRLRSVDTAVYYCVRDRLIVEAPATRDYYYYGMDVWGQGTT |
| | | | VTVSSGGGGSGGGGSGGGGSEIVLTQSPGTLSLSPGERATLSCRASQSVRSTYLAWYQQTPG |
| | | | QAPRLLISGASSRATGIPDRFSGSGSGTDFILTISRLEPEDFAVYYCQQYDASPITFGCGTR |
| | | | LEIK |
| 90 | H7I/ | ARTIFICIAL | QVQLVQSGAEVKKPGASVKVSCKASGYTFTGYYVHWVRQAPGQCLEWMGWINPNSGATNYAQ |
| | BISPECIFIC | | KFQGRVTMTRDTSISTAYMELSRLRSVDTAVYYCVRDRLIVEAPATRDYYYYGMDVWGQGTT |
| | MOL I2E | | VTVSSGGGGSGGGGSGGGGSEIVLTQSPGTLSLSPGERATLSCRASQSVRSTYLAWYQQTPG |
| | | | QAPRLLISGASSRATGIPDRFSGSGSGTDFILTISRLEPEDFAVYYCQQYDASPITFGCGTR |
| | | | LEIKSGGGGSEVQLVESGGGLVQPGGSLKLSCAASGFTFNKYAINWVRQAPGKGLEWVARIR |
| | | | SKYNNYATYYADAVKDRFTISRDDSKNTVYLQMNNLKTEDTAVYYCARAGNFGSSYISYWAY |
| | | | WGQGTLVTVSSGGGGSGGGGSGGGGSQTVVTQEPSLTVSPGGTVTITCGSSTGAVTSGNYPN |
| | | | WVQKKPGQAPRGLIGGTKFLAPGTPARFSGSLSGGKAALTLSGVQPEDEAEYYCVLWYSNRW |
| | | | VFGSGTKLTVL |
| 91 | H7I/HLE- | ARTIFICIAL | QVQLVQSGAEVKKPGASVKVSCKASGYTFTGYYVHWVRQAPGQCLEWMGWINPNSGATNYAQ |
| | BITE I2E | | KFQGRVTMTRDTSISTAYMELSRLRSVDTAVYYCVRDRLIVEAPATRDYYYYGMDVWGQGTT |
| | | | VTVSSGGGGSGGGGSGGGGSEIVLTQSPGTLSLSPGERATLSCRASQSVRSTYLAWYQQTPG |
| | | | QAPRLLISGASSRATGIPDRFSGSGSGTDFILTISRLEPEDFAVYYCQQYDASPITFGCGTR |
| | | | LEIKSGGGGSEVQLVESGGGLVQPGGSLKLSCAASGFTFNKYAINWVRQAPGKGLEWVARIR |
| | | | SKYNNYATYYADAVKDRFTISRDDSKNTVYLQMNNLKTEDTAVYYCARAGNFGSSYISYWAY |
| | | | WGQGTLVTVSSGGGGSGGGGSGGGGSQTVVTQEPSLTVSPGGTVTITCGSSTGAVTSGNYPN |
| | | | WVQKKPGQAPRGLIGGTKFLAPGTPARFSGSLSGGKAALTLSGVQPEDEAEYYCVLWYSNRW |
| | | | VFGSGTKLTVLGGGGDKTHTCPPCPAPELLGGPSVFLFPPKPKDTLMISRTPEVTCVVVDVS |
| | | | HEDPEVKFNWYVDGVEVHNAKTKPCEEQYGSTYRCVSVLTVLHQDWLNGKEYKCKVSNKALP |
| | | | APIEKTISKAKGQPREPQVYTLPPSREEMTKNQVSLTCLVKGFYPSDIAVEWESNGQPENNY |
| | | | KTTPPVLDSDGSFFLYSKLTVDKSRWQQGNVFSCSVMHEALHNHYTQKSLSLSPGKGGGGSG |
| | | | GGGSGGGGSGGGGSGGGGSGGGGSDKTHTCPPCPAPELLGGPSVFLFPPKPKDTLMISRTPE |
| | | | VTCVVVDVSHEDPEVKFNWYVDGVEVHNAKTKPCEEQYGSTYRCVSVLTVLHQDWLNGKEYK |
| | | | CKVSNKALPAPIEKTISKAKGQPREPQVYTLPPSREEMTKNQVSLTCLVKGFYPSDIAVEWE |
| | | | SNGQPENNYKTTPPVLDSDGSFFLYSKLTVDKSRWQQGNVFSCSVMHEALHNHYTQKSLSLS |
| | | | PGK |
| 92 | H7I/SCFV | ARTIFICIAL | QVQLVQSGAEVKKPGASVKVSCKASGYTFTGYYVHWVRQAPGQCLEWMGWINPNSGATNYAQ |
| | I2C | | KFQGRVTMTRDTSISTAYMELSRLRSVDTAVYYCVRDRLIVEAPATRDYYYYGMDVWGQGTT |
| | | | VTVSSGGGGSGGGGSGGGGSEIVLTQSPGTLSLSPGERATLSCRASQSVRSTYLAWYQQTPG |
| | | | QAPRLLISGASSRATGIPDRFSGSGSGTDFILTISRLEPEDFAVYYCQQYDASPITFGCGTR |
| | | | LEIK |
| 93 | H7I/ | ARTIFICIAL | QVQLVQSGAEVKKPGASVKVSCKASGYTFTGYYVHWVRQAPGQCLEWMGWINPNSGATNYAQ |
| | BISPECIFIC | | KFQGRVTMTRDTSISTAYMELSRLRSVDTAVYYCVRDRLIVEAPATRDYYYYGMDVWGQGTT |
| | MOL I2C | | VTVSSGGGGSGGGGSGGGGSEIVLTQSPGTLSLSPGERATLSCRASQSVRSTYLAWYQQTPG |
| | | | QAPRLLISGASSRATGIPDRFSGSGSGTDFILTISRLEPEDFAVYYCQQYDASPITFGCGTR |
| | | | LEIKSGGGGSEVQLVESGGGLVQPGGSLKLSCAASGFTFNKYAMNWVRQAPGKGLEWVARIR |
| | | | SKYNNYATYYADSVKDRFTISRDDSKNTAYLQMNNLKTEDTAVYYCVRHGNFGNSYISYWAY |
| | | | WGQGTLVTVSSGGGGSGGGGSGGGGSQTVVTQEPSLTVSPGGTVTLTCGSSTGAVTSGNYPN |
| | | | WVQQKPGQAPRGLIGGTKFLAPGTPARFSGSLLGGKAALTLSGVQPEDEAEYYCVLWYSNRW |
| | | | VFGGGTKLTVL |
| 94 | H7I/HLE | ARTIFICIAL | QVQLVQSGAEVKKPGASVKVSCKASGYTFTGYYVHWVRQAPGQCLEWMGWINPNSGATNYAQ |
| | BITE I2C | | KFQGRVTMTRDTSISTAYMELSRLRSVDTAVYYCVRDRLIVEAPATRDYYYYGMDVWGQGTT |
| | | | VTVSSGGGGSGGGGSGGGGSEIVLTQSPGTLSLSPGERATLSCRASQSVRSTYLAWYQQTPG |
| | | | QAPRLLISGASSRATGIPDRFSGSGSGTDFILTISRLEPEDFAVYYCQQYDASPITFGCGTR |
| | | | LEIKSGGGGSEVQLVESGGGLVQPGGSLKLSCAASGFTFNKYAMNWVRQAPGKGLEWVARIR |
| | | | SKYNNYATYYADSVKDRFTISRDDSKNTAYLQMNNLKTEDTAVYYCVRHGNFGNSYISYWAY |
| | | | WGQGTLVTVSSGGGGSGGGGSGGGGSQTVVTQEPSLTVSPGGTVTLTCGSSTGAVTSGNYPN |
| | | | WVQQKPGQAPRGLIGGTKFLAPGTPARFSGSLLGGKAALTLSGVQPEDEAEYYCVLWYSNRW |
| | | | VFGGGTKLTVLGGGGDKTHTCPPCPAPELLGGPSVFLFPPKPKDTLMISRTPEVTCVVVDVS |
| | | | HEDPEVKFNWYVDGVEVHNAKTKPCEEQYGSTYRCVSVLTVLHQDWLNGKEYKCKVSNKALP |
| | | | APIEKTISKAKGQPREPQVYTLPPSREEMTKNQVSLTCLVKGFYPSDIAVEWESNGQPENNY |
| | | | KTTPPVLDSDGSFFLYSKLTVDKSRWQQGNVFSCSVMHEALHNHYTQKSLSLSPGKGGGGSG |
| | | | GGGSGGGGSGGGGSGGGGSGGGGSDKTHTCPPCPAPELLGGPSVFLFPPKPKDTLMISRTPE |
| | | | VTCVVVDVSHEDPEVKFNWYVDGVEVHNAKTKPCEEQYGSTYRCVSVLTVLHQDWLNGKEYK |
| | | | CKVSNKALPAPIEKTISKAKGQPREPQVYTLPPSREEMTKNQVSLTCLVKGFYPSDIAVEWE |
| | | | SNGQPENNYKTTPPVLDSDGSFFLYSKLTVDKSRWQQGNVFSCSVMHEALHNHYTQKSLSLS |
| | | | PGK |
| 95 | J2I/VH | ARTIFICIAL | QVQLVQSGAEVKKPGASVKVSCKASGYTFTGYYVHWVRQAPGQCLEWMGWINPNSGATNYAQ |
| | | | KFQGRVTMTRDTSISTAYMELSRLRSVDTAVYYCVRDRLIVEAPATRDYYYYGMDVWGQGTT |
| | | | VTVSS |
| 96 | J2I/VL | ARTIFICIAL | EIVLTQSPGTLSLSPGERATLSCRASQSVRSTYLAWYQQTPGQAPRLLISGASSRATGIPDR |
| | | | FSGSGSGTDFILTISRLEPEDFAVYYCQQYQTSPITFGCGTRLEIK |
| 97 | J2I/CDR-H1 | ARTIFICIAL | GYYVH |
| 98 | J2I/CDR-H2 | ARTIFICIAL | WINPNSGATNYAQKFQG |
| 99 | J2I/CDR-H3 | ARTIFICIAL | DRLIVEAPATRDYYYYGMDV |
| 100 | J2I/CDR-L1 | ARTIFICIAL | RASQSVRSTYLA |
| 101 | J2I/CDR-L2 | ARTIFICIAL | GASSRAT |
| 102 | J2I/CDR-L3 | ARTIFICIAL | QQYQTSPIT |
| 103 | J2I/SCFV | ARTIFICIAL | QVQLVQSGAEVKKPGASVKVSCKASGYTFTGYYVHWVRQAPGQCLEWMGWINPNSGATNYAQ |
| | I2E | | KFQGRVTMTRDTSISTAYMELSRLRSVDTAVYYCVRDRLIVEAPATRDYYYYGMDVWGQGTT |
| | | | VTVSSGGGGSGGGGSGGGGSEIVLTQSPGTLSLSPGERATLSCRASQSVRSTYLAWYQQTPG |
| | | | QAPRLLISGASSRATGIPDRFSGSGSGTDFILTISRLEPEDFAVYYCQQYQTSPITFGCGTR |
| | | | LEIK |
| 104 | J2I/ | ARTIFICIAL | QVQLVQSGAEVKKPGASVKVSCKASGYTFTGYYVHWVRQAPGQCLEWMGWINPNSGATNYAQ |
| | BISPECIFIC | | KFQGRVTMTRDTSISTAYMELSRLRSVDTAVYYCVRDRLIVEAPATRDYYYYGMDVWGQGTT |
| | MOL I2E | | VTVSSGGGGSGGGGSGGGGSEIVLTQSPGTLSLSPGERATLSCRASQSVRSTYLAWYQQTPG |
| | | | QAPRLLISGASSRATGIPDRFSGSGSGTDFILTISRLEPEDFAVYYCQQYQTSPITFGCGTR |
| | | | LEIKSGGGGSEVQLVESGGGLVQPGGSLKLSCAASGFTFNKYAINWVRQAPGKGLEWVARIR |
| | | | SKYNNYATYYADAVKDRFTISRDDSKNTVYLQMNNLKTEDTAVYYCARAGNFGSSYISYWAY |
| | | | WGQGTLVTVSSGGGGSGGGGSGGGGSQTVVTQEPSLTVSPGGTVTITCGSSTGAVTSGNYPN |
| | | | WVQKKPGQAPRGLIGGTKFLAPGTPARFSGSLSGGKAALTLSGVQPEDEAEYYCVLWYSNRW |
| | | | VFGSGTKLTVL |
| 105 | J2I/HLE- | ARTIFICIAL | QVQLVQSGAEVKKPGASVKVSCKASGYTFTGYYVHWVRQAPGQCLEWMGWINPNSGATNYAQ |
| | BITE I2E | | KFQGRVTMTRDTSISTAYMELSRLRSVDTAVYYCVRDRLIVEAPATRDYYYYGMDVWGQGTT |
| | | | VTVSSGGGGSGGGGSGGGGSEIVLTQSPGTLSLSPGERATLSCRASQSVRSTYLAWYQQTPG |
| | | | QAPRLLISGASSRATGIPDRFSGSGSGTDFILTISRLEPEDFAVYYCQQYQTSPITFGCGTR |
| | | | LEIKSGGGGSEVQLVESGGGLVQPGGSLKLSCAASGFTFNKYAINWVRQAPGKGLEWVARIR |
| | | | SKYNNYATYYADAVKDRFTISRDDSKNTVYLQMNNLKTEDTAVYYCARAGNFGSSYISYWAY |
| | | | WGQGTLVTVSSGGGGSGGGGSGGGGSQTVVTQEPSLTVSPGGTVTITCGSSTGAVTSGNYPN |
| | | | WVQKKPGQAPRGLIGGTKFLAPGTPARFSGSLSGGKAALTLSGVQPEDEAEYYCVLWYSNRW |
| | | | VFGSGTKLTVLGGGGDKTHTCPPCPAPELLGGPSVFLFPPKPKDTLMISRTPEVTCVVVDVS |
| | | | HEDPEVKFNWYVDGVEVHNAKTKPCEEQYGSTYRCVSVLTVLHQDWLNGKEYKCKVSNKALP |
| | | | APIEKTISKAKGQPREPQVYTLPPSREEMTKNQVSLTCLVKGFYPSDIAVEWESNGQPENNY |
| | | | KTTPPVLDSDGSFFLYSKLTVDKSRWQQGNVFSCSVMHEALHNHYTQKSLSLSPGKGGGGSG |
| | | | GGGSGGGGSGGGGSGGGGSGGGGSDKTHTCPPCPAPELLGGPSVFLFPPKPKDTLMISRTPE |
| | | | VTCVVVDVSHEDPEVKFNWYVDGVEVHNAKTKPCEEQYGSTYRCVSVLTVLHQDWLNGKEYK |
| | | | CKVSNKALPAPIEKTISKAKGQPREPQVYTLPPSREEMTKNQVSLTCLVKGFYPSDIAVEWE |
| | | | SNGQPENNYKTTPPVLDSDGSFFLYSKLTVDKSRWQQGNVFSCSVMHEALHNHYTQKSLSLS |
| | | | PGK |
| 106 | J2I/SCFV | ARTIFICIAL | QVQLVQSGAEVKKPGASVKVSCKASGYTFTGYYVHWVRQAPGQCLEWMGWINPNSGATNYAQ |
| | I2C | | KFQGRVTMTRDTSISTAYMELSRLRSVDTAVYYCVRDRLIVEAPATRDYYYYGMDVWGQGTT |
| | | | VTVSSGGGGSGGGGSGGGGSEIVLTQSPGTLSLSPGERATLSCRASQSVRSTYLAWYQQTPG |
| | | | QAPRLLISGASSRATGIPDRFSGSGSGTDFILTISRLEPEDFAVYYCQQYQTSPITFGCGTR |
| | | | LEIK |
| 107 | J2I/ | ARTIFICIAL | QVQLVQSGAEVKKPGASVKVSCKASGYTFTGYYVHWVRQAPGQCLEWMGWINPNSGATNYAQ |
| | BISPECIFIC | | KFQGRVTMTRDTSISTAYMELSRLRSVDTAVYYCVRDRLIVEAPATRDYYYYGMDVWGQGTT |
| | MOL I2C | | VTVSSGGGGSGGGGSGGGGSEIVLTQSPGTLSLSPGERATLSCRASQSVRSTYLAWYQQTPG |
| | | | QAPRLLISGASSRATGIPDRFSGSGSGTDFILTISRLEPEDFAVYYCQQYQTSPITFGCGTR |
| | | | LEIKSGGGGSEVQLVESGGGLVQPGGSLKLSCAASGFTFNKYAMNWVRQAPGKGLEWVARIR |
| | | | SKYNNYATYYADSVKDRFTISRDDSKNTAYLQMNNLKTEDTAVYYCVRHGNFGNSYISYWAY |
| | | | WGQGTLVTVSSGGGGSGGGGSGGGGSQTVVTQEPSLTVSPGGTVTLTCGSSTGAVTSGNYPN |
| | | | WVQQKPGQAPRGLIGGTKFLAPGTPARFSGSLLGGKAALTLSGVQPEDEAEYYCVLWYSNRW |
| | | | VFGGGTKLTVL |
| 108 | J2I/HLE | ARTIFICIAL | QVQLVQSGAEVKKPGASVKVSCKASGYTFTGYYVHWVRQAPGQCLEWMGWINPNSGATNYAQ |
| | BITE I2C | | KFQGRVTMTRDTSISTAYMELSRLRSVDTAVYYCVRDRLIVEAPATRDYYYYGMDVWGQGTT |
| | | | VTVSSGGGGSGGGGSGGGGSEIVLTQSPGTLSLSPGERATLSCRASQSVRSTYLAWYQQTPG |
| | | | QAPRLLISGASSRATGIPDRFSGSGSGTDFILTISRLEPEDFAVYYCQQYQTSPITFGCGTR |
| | | | LEIKSGGGGSEVQLVESGGGLVQPGGSLKLSCAASGFTFNKYAMNWVRQAPGKGLEWVARIR |
| | | | SKYNNYATYYADSVKDRFTISRDDSKNTAYLQMNNLKTEDTAVYYCVRHGNFGNSYISYWAY |
| | | | WGQGTLVTVSSGGGGSGGGGSGGGGSQTVVTQEPSLTVSPGGTVTLTCGSSTGAVTSGNYPN |
| | | | WVQQKPGQAPRGLIGGTKFLAPGTPARFSGSLLGGKAALTLSGVQPEDEAEYYCVLWYSNRW |
| | | | VFGGGTKLTVLGGGGDKTHTCPPCPAPELLGGPSVFLFPPKPKDTLMISRTPEVTCVVVDVS |
| | | | HEDPEVKFNWYVDGVEVHNAKTKPCEEQYGSTYRCVSVLTVLHQDWLNGKEYKCKVSNKALP |
| | | | APIEKTISKAKGQPREPQVYTLPPSREEMTKNQVSLTCLVKGFYPSDIAVEWESNGQPENNY |
| | | | KTTPPVLDSDGSFFLYSKLTVDKSRWQQGNVFSCSVMHEALHNHYTQKSLSLSPGKGGGGSG |
| | | | GGGSGGGGSGGGGSGGGGSGGGGSDKTHTCPPCPAPELLGGPSVFLFPPKPKDTLMISRTPE |
| | | | VTCVVVDVSHEDPEVKFNWYVDGVEVHNAKTKPCEEQYGSTYRCVSVLTVLHQDWLNGKEYK |
| | | | CKVSNKALPAPIEKTISKAKGQPREPQVYTLPPSREEMTKNQVSLTCLVKGFYPSDIAVEWE |
| | | | SNGQPENNYKTTPPVLDSDGSFFLYSKLTVDKSRWQQGNVFSCSVMHEALHNHYTQKSLSLS |
| | | | PGK |
| 109 | A4K/VH | ARTIFICIAL | QVQLVQSGAEVKKPGASVKVSCKASGYTFTGYYVHWVRQAPGQCLEWMGWINPNSGATNYAQ |
| | | | KFQGRVTMTRDTSISTAYMELSRLRSVDTAVYYCVRDALIVEAPATRDYYYYGMDVWGQGTT |
| | | | VTVSS |
| 110 | A4K/VL | ARTIFICIAL | EIVLTQSPGTLSLSPGERATLSCRASQSVRSTYLAWYQQTPGQAPRLLISGASSRATGIPDR |
| | | | FSGSGSGTDFILTISRLEPEDFAVYYCQQYDASPITFGCGTRLEIK |
| 111 | A4K/CDR-H1 | ARTIFICIAL | GYYVH |
| 112 | A4K/CDR-H2 | ARTIFICIAL | WINPNSGATNYAQKFQG |
| 113 | A4K/CDR-H3 | ARTIFICIAL | DALIVEAPATRDYYYYGMDV |
| 114 | A4K/CDR-L1 | ARTIFICIAL | RASQSVRSTYLA |
| 115 | A4K/CDR-L2 | ARTIFICIAL | GASSRAT |
| 116 | A4K/CDR-L3 | ARTIFICIAL | QQYDASPIT |
| 117 | A4K/SCFV | ARTIFICIAL | QVQLVQSGAEVKKPGASVKVSCKASGYTFTGYYVHWVRQAPGQCLEWMGWINPNSGATNYAQ |
| | I2E | | KFQGRVTMTRDTSISTAYMELSRLRSVDTAVYYCVRDALIVEAPATRDYYYYGMDVWGQGTT |
| | | | VTVSSGGGGSGGGGSGGGGSEIVLTQSPGTLSLSPGERATLSCRASQSVRSTYLAWYQQTPG |
| | | | QAPRLLISGASSRATGIPDRFSGSGSGTDFILTISRLEPEDFAVYYCQQYDASPITFGCGTR |
| | | | LEIK |
| 118 | A4K/ | ARTIFICIAL | QVQLVQSGAEVKKPGASVKVSCKASGYTFTGYYVHWVRQAPGQCLEWMGWINPNSGATNYAQ |
| | BISPECIFIC | | KFQGRVTMTRDTSISTAYMELSRLRSVDTAVYYCVRDALIVEAPATRDYYYYGMDVWGQGTT |
| | MOL I2E | | VTVSSGGGGSGGGGSGGGGSEIVLTQSPGTLSLSPGERATLSCRASQSVRSTYLAWYQQTPG |
| | | | QAPRLLISGASSRATGIPDRFSGSGSGTDFILTISRLEPEDFAVYYCQQYDASPITFGCGTR |
| | | | LEIKSGGGGSEVQLVESGGGLVQPGGSLKLSCAASGFTFNKYAINWVRQAPGKGLEWVARIR |
| | | | SKYNNYATYYADAVKDRFTISRDDSKNTVYLQMNNLKTEDTAVYYCARAGNFGSSYISYWAY |
| | | | WGQGTLVTVSSGGGGSGGGGSGGGGSQTVVTQEPSLTVSPGGTVTITCGSSTGAVTSGNYPN |
| | | | WVQKKPGQAPRGLIGGTKFLAPGTPARFSGSLSGGKAALTLSGVQPEDEAEYYCVLWYSNRW |
| | | | VFGSGTKLTVL |
| 119 | A4K/HLE- | ARTIFICIAL | QVQLVQSGAEVKKPGASVKVSCKASGYTFTGYYVHWVRQAPGQCLEWMGWINPNSGATNYAQ |
| | BITE I2E | | KFQGRVTMTRDTSISTAYMELSRLRSVDTAVYYCVRDALIVEAPATRDYYYYGMDVWGQGTT |
| | | | VTVSSGGGGSGGGGSGGGGSEIVLTQSPGTLSLSPGERATLSCRASQSVRSTYLAWYQQTPG |
| | | | QAPRLLISGASSRATGIPDRFSGSGSGTDFILTISRLEPEDFAVYYCQQYDASPITFGCGTR |
| | | | LEIKSGGGGSEVQLVESGGGLVQPGGSLKLSCAASGFTFNKYAINWVRQAPGKGLEWVARIR |
| | | | SKYNNYATYYADAVKDRFTISRDDSKNTVYLQMNNLKTEDTAVYYCARAGNFGSSYISYWAY |
| | | | WGQGTLVTVSSGGGGSGGGGSGGGGSQTVVTQEPSLTVSPGGTVTITCGSSTGAVTSGNYPN |
| | | | WVQKKPGQAPRGLIGGTKFLAPGTPARFSGSLSGGKAALTLSGVQPEDEAEYYCVLWYSNRW |
| | | | VFGSGTKLTVLGGGGDKTHTCPPCPAPELLGGPSVFLFPPKPKDTLMISRTPEVTCVVVDVS |
| | | | HEDPEVKFNWYVDGVEVHNAKTKPCEEQYGSTYRCVSVLTVLHQDWLNGKEYKCKVSNKALP |
| | | | APIEKTISKAKGQPREPQVYTLPPSREEMTKNQVSLTCLVKGFYPSDIAVEWESNGQPENNY |
| | | | KTTPPVLDSDGSFFLYSKLTVDKSRWQQGNVFSCSVMHEALHNHYTQKSLSLSPGKGGGGSG |
| | | | GGGSGGGGSGGGGSGGGGSGGGGSDKTHTCPPCPAPELLGGPSVFLFPPKPKDTLMISRTPE |
| | | | VTCVVVDVSHEDPEVKFNWYVDGVEVHNAKTKPCEEQYGSTYRCVSVLTVLHQDWLNGKEYK |
| | | | CKVSNKALPAPIEKTISKAKGQPREPQVYTLPPSREEMTKNQVSLTCLVKGFYPSDIAVEWE |
| | | | SNGQPENNYKTTPPVLDSDGSFFLYSKLTVDKSRWQQGNVFSCSVMHEALHNHYTQKSLSLS |
| | | | PGK |
| 120 | A4K/SCFV | ARTIFICIAL | QVQLVQSGAEVKKPGASVKVSCKASGYTFTGYYVHWVRQAPGQCLEWMGWINPNSGATNYAQ |
| | I2C | | KFQGRVTMTRDTSISTAYMELSRLRSVDTAVYYCVRDALIVEAPATRDYYYYGMDVWGQGTT |
| | | | VTVSSGGGGSGGGGSGGGGSEIVLTQSPGTLSLSPGERATLSCRASQSVRSTYLAWYQQTPG |
| | | | QAPRLLISGASSRATGIPDRFSGSGSGTDFILTISRLEPEDFAVYYCQQYDASPITFGCGTR |
| | | | LEIK |
| 121 | A4K/ | ARTIFICIAL | QVQLVQSGAEVKKPGASVKVSCKASGYTFTGYYVHWVRQAPGQCLEWMGWINPNSGATNYAQ |
| | BISPECIFIC | | KFQGRVTMTRDTSISTAYMELSRLRSVDTAVYYCVRDALIVEAPATRDYYYYGMDVWGQGTT |
| | MOL I2C | | VTVSSGGGGSGGGGSGGGGSEIVLTQSPGTLSLSPGERATLSCRASQSVRSTYLAWYQQTPG |
| | | | QAPRLLISGASSRATGIPDRFSGSGSGTDFILTISRLEPEDFAVYYCQQYDASPITFGCGTR |
| | | | LEIKSGGGGSEVQLVESGGGLVQPGGSLKLSCAASGFTFNKYAMNWVRQAPGKGLEWVARIR |
| | | | SKYNNYATYYADSVKDRFTISRDDSKNTAYLQMNNLKTEDTAVYYCVRHGNFGNSYISYWAY |
| | | | WGQGTLVTVSSGGGGSGGGGSGGGGSQTVVTQEPSLTVSPGGTVTLTCGSSTGAVTSGNYPN |
| | | | WVQQKPGQAPRGLIGGTKFLAPGTPARFSGSLLGGKAALTLSGVQPEDEAEYYCVLWYSNRW |
| | | | VFGGGTKLTVL |
| 122 | A4K/HLE | ARTIFICIAL | QVQLVQSGAEVKKPGASVKVSCKASGYTFTGYYVHWVRQAPGQCLEWMGWINPNSGATNYAQ |
| | BITE I2C | | KFQGRVTMTRDTSISTAYMELSRLRSVDTAVYYCVRDALIVEAPATRDYYYYGMDVWGQGTT |
| | | | VTVSSGGGGSGGGGSGGGGSEIVLTQSPGTLSLSPGERATLSCRASQSVRSTYLAWYQQTPG |
| | | | QAPRLLISGASSRATGIPDRFSGSGSGTDFILTISRLEPEDFAVYYCQQYDASPITFGCGTR |
| | | | LEIKSGGGGSEVQLVESGGGLVQPGGSLKLSCAASGFTFNKYAMNWVRQAPGKGLEWVARIR |
| | | | SKYNNYATYYADSVKDRFTISRDDSKNTAYLQMNNLKTEDTAVYYCVRHGNFGNSYISYWAY |
| | | | WGQGTLVTVSSGGGGSGGGGSGGGGSQTVVTQEPSLTVSPGGTVTLTCGSSTGAVTSGNYPN |
| | | | WVQQKPGQAPRGLIGGTKFLAPGTPARFSGSLLGGKAALTLSGVQPEDEAEYYCVLWYSNRW |
| | | | VFGGGTKLTVLGGGGDKTHTCPPCPAPELLGGPSVFLFPPKPKDTLMISRTPEVTCVVVDVS |
| | | | HEDPEVKFNWYVDGVEVHNAKTKPCEEQYGSTYRCVSVLTVLHQDWLNGKEYKCKVSNKALP |
| | | | APIEKTISKAKGQPREPQVYTLPPSREEMTKNQVSLTCLVKGFYPSDIAVEWESNGQPENNY |
| | | | KTTPPVLDSDGSFFLYSKLTVDKSRWQQGNVFSCSVMHEALHNHYTQKSLSLSPGKGGGGSG |
| | | | GGGSGGGGSGGGGSGGGGSGGGGSDKTHTCPPCPAPELLGGPSVFLFPPKPKDTLMISRTPE |
| | | | VTCVVVDVSHEDPEVKFNWYVDGVEVHNAKTKPCEEQYGSTYRCVSVLTVLHQDWLNGKEYK |
| | | | CKVSNKALPAPIEKTISKAKGQPREPQVYTLPPSREEMTKNQVSLTCLVKGFYPSDIAVEWE |
| | | | SNGQPENNYKTTPPVLDSDGSFFLYSKLTVDKSRWQQGNVFSCSVMHEALHNHYTQKSLSLS |
| | | | PGK |
| 123 | E5B/VH | ARTIFICIAL | QVQLVQSGAEVKKPGASVKVSCKASGYTFTGYYVHWVRQAPGQCLEWMGWINPNSGATNYAQ |
| | | | KFQGRVTMTRDTSISTAYMELSRLRSVDTAVYYCVRDALIVEAPATRDYYYYGMDVWGQGTT |
| | | | VTVSS |
| 124 | E5B/VL | ARTIFICIAL | EIVLTQSPGTLSLSPGERATLSCRASQSVRSTYLAWYQQTPGQAPRLLISGASSRATGIPDR |
| | | | FSGSGSGTDFILTISRLEPEDFAVYYCQQYQTSPITFGCGTRLEIK |
| 125 | E5B/CDR-H1 | ARTIFICIAL | GYYVH |
| 126 | E5B/CDR-H2 | ARTIFICIAL | WINPNSGATNYAQKFQG |
| 127 | E5B/CDR-H3 | ARTIFICIAL | DALIVEAPATRDYYYYGMDV |
| 128 | E5B/CDR-L1 | ARTIFICIAL | RASQSVRSTYLA |
| 129 | E5B/CDR-L2 | ARTIFICIAL | GASSRAT |
| 130 | E5B/CDR-L3 | ARTIFICIAL | QQYQTSPIT |
| 131 | E5B 1 SCFV | ARTIFICIAL | QVQLVQSGAEVKKPGASVKVSCKASGYTFTGYYVHWVRQAPGQCLEWMGWINPNSGATNYAQ |
| | I2E | | KFQGRVTMTRDTSISTAYMELSRLRSVDTAVYYCVRDALIVEAPATRDYYYYGMDVWGQGTT |
| | | | VTVSSGGGGSGGGGSGGGGSEIVLTQSPGTLSLSPGERATLSCRASQSVRSTYLAWYQQTPG |
| | | | QAPRLLISGASSRATGIPDRFSGSGSGTDFILTISRLEPEDFAVYYCQQYQTSPITFGCGTR |
| | | | LEIK |
| 132 | E5B/ | ARTIFICIAL | QVQLVQSGAEVKKPGASVKVSCKASGYTFTGYYVHWVRQAPGQCLEWMGWINPNSGATNYAQ |
| | BISPECIFIC | | KFQGRVTMTRDTSISTAYMELSRLRSVDTAVYYCVRDALIVEAPATRDYYYYGMDVWGQGTT |
| | MOL I2E | | VTVSSGGGGSGGGGSGGGGSEIVLTQSPGTLSLSPGERATLSCRASQSVRSTYLAWYQQTPG |
| | | | QAPRLLISGASSRATGIPDRFSGSGSGTDFILTISRLEPEDFAVYYCQQYQTSPITFGCGTR |
| | | | LEIKSGGGGSEVQLVESGGGLVQPGGSLKLSCAASGFTFNKYAINWVRQAPGKGLEWVARIR |
| | | | SKYNNYATYYADAVKDRFTISRDDSKNTVYLQMNNLKTEDTAVYYCARAGNFGSSYISYWAY |
| | | | WGQGTLVTVSSGGGGSGGGGSGGGGSQTVVTQEPSLTVSPGGTVTITCGSSTGAVTSGNYPN |
| | | | WVQKKPGQAPRGLIGGTKFLAPGTPARFSGSLSGGKAALTLSGVQPEDEAEYYCVLWYSNRW |
| | | | VFGSGTKLTVL |
| 133 | E5B/HLE- | ARTIFICIAL | QVQLVQSGAEVKKPGASVKVSCKASGYTFTGYYVHWVRQAPGQCLEWMGWINPNSGATNYAQ |
| | BITE I2E | | KFQGRVTMTRDTSISTAYMELSRLRSVDTAVYYCVRDALIVEAPATRDYYYYGMDVWGQGTT |
| | | | VTVSSGGGGSGGGGSGGGGSEIVLTQSPGTLSLSPGERATLSCRASQSVRSTYLAWYQQTPG |
| | | | QAPRLLISGASSRATGIPDRFSGSGSGTDFILTISRLEPEDFAVYYCQQYQTSPITFGCGTR |
| | | | LEIKSGGGGSEVQLVESGGGLVQPGGSLKLSCAASGFTFNKYAINWVRQAPGKGLEWVARIR |
| | | | SKYNNYATYYADAVKDRFTISRDDSKNTVYLQMNNLKTEDTAVYYCARAGNFGSSYISYWAY |
| | | | WGQGTLVTVSSGGGGSGGGGSGGGGSQTVVTQEPSLTVSPGGTVTITCGSSTGAVTSGNYPN |
| | | | WVQKKPGQAPRGLIGGTKFLAPGTPARFSGSLSGGKAALTLSGVQPEDEAEYYCVLWYSNRW |
| | | | VFGSGTKLTVLGGGGDKTHTCPPCPAPELLGGPSVFLFPPKPKDTLMISRTPEVTCVVVDVS |
| | | | HEDPEVKFNWYVDGVEVHNAKTKPCEEQYGSTYRCVSVLTVLHQDWLNGKEYKCKVSNKALP |
| | | | APIEKTISKAKGQPREPQVYTLPPSREEMTKNQVSLTCLVKGFYPSDIAVEWESNGQPENNY |
| | | | KTTPPVLDSDGSFFLYSKLTVDKSRWQQGNVFSCSVMHEALHNHYTQKSLSLSPGKGGGGSG |
| | | | GGGSGGGGSGGGGSGGGGSGGGGSDKTHTCPPCPAPELLGGPSVFLFPPKPKDTLMISRTPE |
| | | | VTCVVVDVSHEDPEVKFNWYVDGVEVHNAKTKPCEEQYGSTYRCVSVLTVLHQDWLNGKEYK |
| | | | CKVSNKALPAPIEKTISKAKGQPREPQVYTLPPSREEMTKNQVSLTCLVKGFYPSDIAVEWE |
| | | | SNGQPENNYKTTPPVLDSDGSFFLYSKLTVDKSRWQQGNVFSCSVMHEALHNHYTQKSLSLS |
| | | | PGK |
| 134 | E5B/SCFV | ARTIFICIAL | QVQLVQSGAEVKKPGASVKVSCKASGYTFTGYYVHWVRQAPGQCLEWMGWINPNSGATNYAQ |
| | I2C | | KFQGRVTMTRDTSISTAYMELSRLRSVDTAVYYCVRDALIVEAPATRDYYYYGMDVWGQGTT |
| | | | VTVSSGGGGSGGGGSGGGGSEIVLTQSPGTLSLSPGERATLSCRASQSVRSTYLAWYQQTPG |
| | | | QAPRLLISGASSRATGIPDRFSGSGSGTDFILTISRLEPEDFAVYYCQQYQTSPITFGCGTR |
| | | | LEIK |
| 135 | E5B/ | ARTIFICIAL | QVQLVQSGAEVKKPGASVKVSCKASGYTFTGYYVHWVRQAPGQCLEWMGWINPNSGATNYAQ |
| | BISPECIFIC | | KFQGRVTMTRDTSISTAYMELSRLRSVDTAVYYCVRDALIVEAPATRDYYYYGMDVWGQGTT |
| | MOL I2C | | VTVSSGGGGSGGGGSGGGGSEIVLTQSPGTLSLSPGERATLSCRASQSVRSTYLAWYQQTPG |
| | | | QAPRLLISGASSRATGIPDRFSGSGSGTDFILTISRLEPEDFAVYYCQQYQTSPITFGCGTR |
| | | | LEIKSGGGGSEVQLVESGGGLVQPGGSLKLSCAASGFTFNKYAMNWVRQAPGKGLEWVARIR |
| | | | SKYNNYATYYADSVKDRFTISRDDSKNTAYLQMNNLKTEDTAVYYCVRHGNFGNSYISYWAY |
| | | | WGQGTLVTVSSGGGGSGGGGSGGGGSQTVVTQEPSLTVSPGGTVTLTCGSSTGAVTSGNYPN |
| | | | WVQQKPGQAPRGLIGGTKFLAPGTPARFSGSLLGGKAALTLSGVQPEDEAEYYCVLWYSNRW |
| | | | VFGGGTKLTVL |
| 136 | E5B/HLE | ARTIFICIAL | QVQLVQSGAEVKKPGASVKVSCKASGYTFTGYYVHWVRQAPGQCLEWMGWINPNSGATNYAQ |
| | BITE I2C | | KFQGRVTMTRDTSISTAYMELSRLRSVDTAVYYCVRDALIVEAPATRDYYYYGMDVWGQGTT |
| | | | VTVSSGGGGSGGGGSGGGGSEIVLTQSPGTLSLSPGERATLSCRASQSVRSTYLAWYQQTPG |
| | | | QAPRLLISGASSRATGIPDRFSGSGSGTDFILTISRLEPEDFAVYYCQQYQTSPITFGCGTR |
| | | | LEIKSGGGGSEVQLVESGGGLVQPGGSLKLSCAASGFTFNKYAMNWVRQAPGKGLEWVARIR |
| | | | SKYNNYATYYADSVKDRFTISRDDSKNTAYLQMNNLKTEDTAVYYCVRHGNFGNSYISYWAY |
| | | | WGQGTLVTVSSGGGGSGGGGSGGGGSQTVVTQEPSLTVSPGGTVTLTCGSSTGAVTSGNYPN |
| | | | WVQQKPGQAPRGLIGGTKFLAPGTPARFSGSLLGGKAALTLSGVQPEDEAEYYCVLWYSNRW |
| | | | VFGGGTKLTVLGGGGDKTHTCPPCPAPELLGGPSVFLFPPKPKDTLMISRTPEVTCVVVDVS |
| | | | HEDPEVKFNWYVDGVEVHNAKTKPCEEQYGSTYRCVSVLTVLHQDWLNGKEYKCKVSNKALP |
| | | | APIEKTISKAKGQPREPQVYTLPPSREEMTKNQVSLTCLVKGFYPSDIAVEWESNGQPENNY |
| | | | KTTPPVLDSDGSFFLYSKLTVDKSRWQQGNVFSCSVMHEALHNHYTQKSLSLSPGKGGGGSG |
| | | | GGGSGGGGSGGGGSGGGGSGGGGSDKTHTCPPCPAPELLGGPSVFLFPPKPKDTLMISRTPE |
| | | | VTCVVVDVSHEDPEVKFNWYVDGVEVHNAKTKPCEEQYGSTYRCVSVLTVLHQDWLNGKEYK |
| | | | CKVSNKALPAPIEKTISKAKGQPREPQVYTLPPSREEMTKNQVSLTCLVKGFYPSDIAVEWE |
| | | | SNGQPENNYKTTPPVLDSDGSFFLYSKLTVDKSRWQQGNVFSCSVMHEALHNHYTQKSLSLS |
| | | | PGK |
| 137 | R8B/VH | ARTIFICIAL | QVQLVQSGAEVKKPGASVKVSCKASGYTFTGYYVHWVRQAPGQCLEWMGWINPNSGATNYAQ |
| | | | KFQGRVTMTRDTSISTAYMELSRLRSVDTAVYYCVRDALIVEAPATRDYYYYGMDVWGQGTT |
| | | | VTVSS |
| 138 | R8B/VL | ARTIFICIAL | EIVLTQSPGTLSLSPGERATLSCRASQSVRSTYLAWYQQKPGQAPRLLIIGASSRATGIPDR |
| | | | FSGSGSGTDFTLTISRLEPEDFAVYYCQQYDASPITFGCGTRLEIK |
| 139 | R8B/CDR-H1 | ARTIFICIAL | GYYVH |
| 140 | R8B/CDR-H2 | ARTIFICIAL | WINPNSGATNYAQKFQG |
| 141 | R8B/CDR-H3 | ARTIFICIAL | DALIVEAPATRDYYYYGMDV |
| 142 | R8B/CDR-L1 | ARTIFICIAL | RASQSVRSTYLA |
| 143 | R8B/CDR-L2 | ARTIFICIAL | GASSRAT |
| 144 | R8B/CDR-L3 | ARTIFICIAL | QQYDASPIT |
| 145 | R8B/SCFV | ARTIFICIAL | QVQLVQSGAEVKKPGASVKVSCKASGYTFTGYYVHWVRQAPGQCLEWMGWINPNSGATNYAQ |
| | I2E | | KFQGRVTMTRDTSISTAYMELSRLRSVDTAVYYCVRDALIVEAPATRDYYYYGMDVWGQGTT |
| | | | VTVSSGGGGSGGGGSGGGGSEIVLTQSPGTLSLSPGERATLSCRASQSVRSTYLAWYQQKPG |
| | | | QAPRLLIIGASSRATGIPDRFSGSGSGTDFTLTISRLEPEDFAVYYCQQYDASPITFGCGTR |
| | | | LEIK |
| 146 | R8B/ | ARTIFICIAL | QVQLVQSGAEVKKPGASVKVSCKASGYTFTGYYVHWVRQAPGQCLEWMGWINPNSGATNYAQ |
| | BISPECIFIC | | KFQGRVTMTRDTSISTAYMELSRLRSVDTAVYYCVRDALIVEAPATRDYYYYGMDVWGQGTT |
| | MOL I2E | | VTVSSGGGGSGGGGSGGGGSEIVLTQSPGTLSLSPGERATLSCRASQSVRSTYLAWYQQKPG |
| | | | QAPRLLIIGASSRATGIPDRFSGSGSGTDFTLTISRLEPEDFAVYYCQQYDASPITFGCGTR |
| | | | LEIKSGGGGSEVQLVESGGGLVQPGGSLKLSCAASGFTFNKYAINWVRQAPGKGLEWVARIR |
| | | | SKYNNYATYYADAVKDRFTISRDDSKNTVYLQMNNLKTEDTAVYYCARAGNFGSSYISYWAY |
| | | | WGQGTLVTVSSGGGGSGGGGSGGGGSQTVVTQEPSLTVSPGGTVTITCGSSTGAVTSGNYPN |
| | | | WVQKKPGQAPRGLIGGTKFLAPGTPARFSGSLSGGKAALTLSGVQPEDEAEYYCVLWYSNRW |
| | | | VFGSGTKLTVL |
| 147 | R8B/HLE- | ARTIFICIAL | QVQLVQSGAEVKKPGASVKVSCKASGYTFTGYYVHWVRQAPGQCLEWMGWINPNSGATNYAQ |
| | BITE I2E | | KFQGRVTMTRDTSISTAYMELSRLRSVDTAVYYCVRDALIVEAPATRDYYYYGMDVWGQGTT |
| | | | VTVSSGGGGSGGGGSGGGGSEIVLTQSPGTLSLSPGERATLSCRASQSVRSTYLAWYQQKPG |
| | | | QAPRLLIIGASSRATGIPDRFSGSGSGTDFTLTISRLEPEDFAVYYCQQYDASPITFGCGTR |
| | | | LEIKSGGGGSEVQLVESGGGLVQPGGSLKLSCAASGFTFNKYAINWVRQAPGKGLEWVARIR |
| | | | SKYNNYATYYADAVKDRFTISRDDSKNTVYLQMNNLKTEDTAVYYCARAGNFGSSYISYWAY |
| | | | WGQGTLVTVSSGGGGSGGGGSGGGGSQTVVTQEPSLTVSPGGTVTITCGSSTGAVTSGNYPN |
| | | | WVQKKPGQAPRGLIGGTKFLAPGTPARFSGSLSGGKAALTLSGVQPEDEAEYYCVLWYSNRW |
| | | | VFGSGTKLTVLGGGGDKTHTCPPCPAPELLGGPSVFLFPPKPKDTLMISRTPEVTCVVVDVS |
| | | | HEDPEVKFNWYVDGVEVHNAKTKPCEEQYGSTYRCVSVLTVLHQDWLNGKEYKCKVSNKALP |
| | | | APIEKTISKAKGQPREPQVYTLPPSREEMTKNQVSLTCLVKGFYPSDIAVEWESNGQPENNY |
| | | | KTTPPVLDSDGSFFLYSKLTVDKSRWQQGNVFSCSVMHEALHNHYTQKSLSLSPGKGGGGSG |
| | | | GGGSGGGGSGGGGSGGGGSGGGGSDKTHTCPPCPAPELLGGPSVFLFPPKPKDTLMISRTPE |
| | | | VTCVVVDVSHEDPEVKFNWYVDGVEVHNAKTKPCEEQYGSTYRCVSVLTVLHQDWLNGKEYK |
| | | | CKVSNKALPAPIEKTISKAKGQPREPQVYTLPPSREEMTKNQVSLTCLVKGFYPSDIAVEWE |
| | | | SNGQPENNYKTTPPVLDSDGSFFLYSKLTVDKSRWQQGNVFSCSVMHEALHNHYTQKSLSLS |
| | | | PGK |
| 148 | R8B/SCFV | ARTIFICIAL | QVQLVQSGAEVKKPGASVKVSCKASGYTFTGYYVHWVRQAPGQCLEWMGWINPNSGATNYAQ |
| | I2C | | KFQGRVTMTRDTSISTAYMELSRLRSVDTAVYYCVRDALIVEAPATRDYYYYGMDVWGQGTT |
| | | | VTVSSGGGGSGGGGSGGGGSEIVLTQSPGTLSLSPGERATLSCRASQSVRSTYLAWYQQKPG |
| | | | QAPRLLIIGASSRATGIPDRFSGSGSGTDFTLTISRLEPEDFAVYYCQQYDASPITFGCGTR |
| | | | LEIK |
| 149 | R8B/ | ARTIFICIAL | QVQLVQSGAEVKKPGASVKVSCKASGYTFTGYYVHWVRQAPGQCLEWMGWINPNSGATNYAQ |
| | BISPECIFIC | | KFQGRVTMTRDTSISTAYMELSRLRSVDTAVYYCVRDALIVEAPATRDYYYYGMDVWGQGTT |
| | MOL I2C | | VTVSSGGGGSGGGGSGGGGSEIVLTQSPGTLSLSPGERATLSCRASQSVRSTYLAWYQQKPG |
| | | | QAPRLLIIGASSRATGIPDRFSGSGSGTDFTLTISRLEPEDFAVYYCQQYDASPITFGCGTR |
| | | | LEIKSGGGGSEVQLVESGGGLVQPGGSLKLSCAASGFTFNKYAMNWVRQAPGKGLEWVARIR |
| | | | SKYNNYATYYADSVKDRFTISRDDSKNTAYLQMNNLKTEDTAVYYCVRHGNFGNSYISYWAY |
| | | | WGQGTLVTVSSGGGGSGGGGSGGGGSQTVVTQEPSLTVSPGGTVTLTCGSSTGAVTSGNYPN |
| | | | WVQQKPGQAPRGLIGGTKFLAPGTPARFSGSLLGGKAALTLSGVQPEDEAEYYCVLWYSNRW |
| | | | VFGGGTKLTVL |
| 150 | R8B/HLE | ARTIFICIAL | QVQLVQSGAEVKKPGASVKVSCKASGYTFTGYYVHWVRQAPGQCLEWMGWINPNSGATNYAQ |
| | BITE I2C | | KFQGRVTMTRDTSISTAYMELSRLRSVDTAVYYCVRDALIVEAPATRDYYYYGMDVWGQGTT |
| | | | VTVSSGGGGSGGGGSGGGGSEIVLTQSPGTLSLSPGERATLSCRASQSVRSTYLAWYQQKPG |
| | | | QAPRLLIIGASSRATGIPDRFSGSGSGTDFTLTISRLEPEDFAVYYCQQYDASPITFGCGTR |
| | | | LEIKSGGGGSEVQLVESGGGLVQPGGSLKLSCAASGFTFNKYAMNWVRQAPGKGLEWVARIR |
| | | | SKYNNYATYYADSVKDRFTISRDDSKNTAYLQMNNLKTEDTAVYYCVRHGNFGNSYISYWAY |
| | | | WGQGTLVTVSSGGGGSGGGGSGGGGSQTVVTQEPSLTVSPGGTVTLTCGSSTGAVTSGNYPN |
| | | | WVQQKPGQAPRGLIGGTKFLAPGTPARFSGSLLGGKAALTLSGVQPEDEAEYYCVLWYSNRW |
| | | | VFGGGTKLTVLGGGGDKTHTCPPCPAPELLGGPSVFLFPPKPKDTLMISRTPEVTCVVVDVS |
| | | | HEDPEVKFNWYVDGVEVHNAKTKPCEEQYGSTYRCVSVLTVLHQDWLNGKEYKCKVSNKALP |
| | | | APIEKTISKAKGQPREPQVYTLPPSREEMTKNQVSLTCLVKGFYPSDIAVEWESNGQPENNY |
| | | | KTTPPVLDSDGSFFLYSKLTVDKSRWQQGNVFSCSVMHEALHNHYTQKSLSLSPGKGGGGSG |
| | | | GGGSGGGGSGGGGSGGGGSGGGGSDKTHTCPPCPAPELLGGPSVFLFPPKPKDTLMISRTPE |
| | | | VTCVVVDVSHEDPEVKFNWYVDGVEVHNAKTKPCEEQYGSTYRCVSVLTVLHQDWLNGKEYK |
| | | | CKVSNKALPAPIEKTISKAKGQPREPQVYTLPPSREEMTKNQVSLTCLVKGFYPSDIAVEWE |
| | | | SNGQPENNYKTTPPVLDSDGSFFLYSKLTVDKSRWQQGNVFSCSVMHEALHNHYTQKSLSLS |
| | | | PGK |
| 151 | IX9/VH | ARTIFICIAL | QVQLVQSGAEVKKPGASVKVSCKASGYTFTGYYMHWVRQAPGQCLEWMGWINPNSGETNYAQ |
| | | | KFQGRVTMTRDTSISTAYMELSRLRSDDTAVYYCARDALIVVAPVTRDYYYYGMDVWGQGTT |
| | | | VTASS |
| 152 | IX9/VL | ARTIFICIAL | EIVLTQSPGTLSLSPGERATLSCRASQTVSSSYLVWYQQKPGQAPRLLIYGASSRATGIPDR |
| | | | FSGSGSGTDFTLTISRLEPEDFAVYYCQQYGGSPITFGCGTRLEIK |
| 153 | IX9/CDR-H1 | ARTIFICIAL | GYYMH |
| 154 | IX9/CDR-H2 | ARTIFICIAL | WINPNSGETNYAQKFQG |
| 155 | IX9/CDR-H3 | ARTIFICIAL | DALIVVAPVTRDYYYYGMDV |
| 156 | IX9/CDR-L1 | ARTIFICIAL | RASQTVSSSYLV |
| 157 | IX9/CDR-L2 | ARTIFICIAL | GASSRAT |
| 158 | IX9/CDR-L3 | ARTIFICIAL | QQYGGSPIT |
| 159 | IX9/SCFV | ARTIFICIAL | EIVLTQSPGTLSLSPGERATLSCRASQTVSSSYLVWYQQKPGQAPRLLIYGASSRATGIPDR |
| | I2E | | FSGSGSGTDFTLTISRLEPEDFAVYYCQQYGGSPITFGCGTRLEIKGGGGSGGGGSGGGGSQ |
| | | | VQLVQSGAEVKKPGASVKVSCKASGYTFTGYYMHWVRQAPGQCLEWMGWINPNSGETNYAQK |
| | | | FQGRVTMTRDTSISTAYMELSRLRSDDTAVYYCARDALIVVAPVTRDYYYYGMDVWGQGTTV |
| | | | TASS |
| 160 | IX9/ | ARTIFICIAL | EIVLTQSPGTLSLSPGERATLSCRASQTVSSSYLVWYQQKPGQAPRLLIYGASSRATGIPDR |
| | BISPECIFIC | | FSGSGSGTDFTLTISRLEPEDFAVYYCQQYGGSPITFGCGTRLEIKGGGGSGGGGSGGGGSQ |
| | MOL I2E | | VQLVQSGAEVKKPGASVKVSCKASGYTFTGYYMHWVRQAPGQCLEWMGWINPNSGETNYAQK |
| | | | FQGRVTMTRDTSISTAYMELSRLRSDDTAVYYCARDALIVVAPVTRDYYYYGMDVWGQGTTV |
| | | | TASSSGGGGSEVQLVESGGGLVQPGGSLKLSCAASGFTFNKYAINWVRQAPGKGLEWVARIR |
| | | | SKYNNYATYYADAVKDRFTISRDDSKNTVYLQMNNLKTEDTAVYYCARAGNFGSSYISYWAY |
| | | | WGQGTLVTVSSGGGGSGGGGSGGGGSQTVVTQEPSLTVSPGGTVTITCGSSTGAVTSGNYPN |
| | | | WVQKKPGQAPRGLIGGTKFLAPGTPARFSGSLSGGKAALTLSGVQPEDEAEYYCVLWYSNRW |
| | | | VFGSGTKLTVL |
| 161 | IX9/HLE- | ARTIFICIAL | EIVLTQSPGTLSLSPGERATLSCRASQTVSSSYLVWYQQKPGQAPRLLIYGASSRATGIPDR |
| | BITE I2E | | FSGSGSGTDFTLTISRLEPEDFAVYYCQQYGGSPITFGCGTRLEIKGGGGSGGGGSGGGGSQ |
| | | | VQLVQSGAEVKKPGASVKVSCKASGYTFTGYYMHWVRQAPGQCLEWMGWINPNSGETNYAQK |
| | | | FQGRVTMTRDTSISTAYMELSRLRSDDTAVYYCARDALIVVAPVTRDYYYYGMDVWGQGTTV |
| | | | TASSSGGGGSEVQLVESGGGLVQPGGSLKLSCAASGFTFNKYAINWVRQAPGKGLEWVARIR |
| | | | SKYNNYATYYADAVKDRFTISRDDSKNTVYLQMNNLKTEDTAVYYCARAGNFGSSYISYWAY |
| | | | WGQGTLVTVSSGGGGSGGGGSGGGGSQTVVTQEPSLTVSPGGTVTITCGSSTGAVTSGNYPN |
| | | | WVQKKPGQAPRGLIGGTKFLAPGTPARFSGSLSGGKAALTLSGVQPEDEAEYYCVLWYSNRW |
| | | | VFGSGTKLTVLGGGGDKTHTCPPCPAPELLGGPSVFLFPPKPKDTLMISRTPEVTCVVVDVS |
| | | | HEDPEVKFNWYVDGVEVHNAKTKPCEEQYGSTYRCVSVLTVLHQDWLNGKEYKCKVSNKALP |
| | | | APIEKTISKAKGQPREPQVYTLPPSREEMTKNQVSLTCLVKGFYPSDIAVEWESNGQPENNY |
| | | | KTTPPVLDSDGSFFLYSKLTVDKSRWQQGNVFSCSVMHEALHNHYTQKSLSLSPGKGGGGSG |
| | | | GGGSGGGGSGGGGSGGGGSGGGGSDKTHTCPPCPAPELLGGPSVFLFPPKPKDTLMISRTPE |
| | | | VTCVVVDVSHEDPEVKFNWYVDGVEVHNAKTKPCEEQYGSTYRCVSVLTVLHQDWLNGKEYK |
| | | | CKVSNKALPAPIEKTISKAKGQPREPQVYTLPPSREEMTKNQVSLTCLVKGFYPSDIAVEWE |
| | | | SNGQPENNYKTTPPVLDSDGSFFLYSKLTVDKSRWQQGNVFSCSVMHEALHNHYTQKSLSLS |
| | | | PGK |
| 162 | IX9/SCFV | ARTIFICIAL | EIVLTQSPGTLSLSPGERATLSCRASQTVSSSYLVWYQQKPGQAPRLLIYGASSRATGIPDR |
| | I2C | | FSGSGSGTDFTLTISRLEPEDFAVYYCQQYGGSPITFGCGTRLEIKGGGGSGGGGSGGGGSQ |
| | | | VQLVQSGAEVKKPGASVKVSCKASGYTFTGYYMHWVRQAPGQCLEWMGWINPNSGETNYAQK |
| | | | FQGRVTMTRDTSISTAYMELSRLRSDDTAVYYCARDALIVVAPVTRDYYYYGMDVWGQGTTV |
| | | | TASS |
| 163 | IX9/ | ARTIFICIAL | EIVLTQSPGTLSLSPGERATLSCRASQTVSSSYLVWYQQKPGQAPRLLIYGASSRATGIPDR |
| | BISPECIFIC | | FSGSGSGTDFTLTISRLEPEDFAVYYCQQYGGSPITFGCGTRLEIKGGGGSGGGGSGGGGSQ |
| | MOL I2C | | VQLVQSGAEVKKPGASVKVSCKASGYTFTGYYMHWVRQAPGQCLEWMGWINPNSGETNYAQK |
| | | | FQGRVTMTRDTSISTAYMELSRLRSDDTAVYYCARDALIVVAPVTRDYYYYGMDVWGQGTTV |
| | | | TASSSGGGGSEVQLVESGGGLVQPGGSLKLSCAASGFTFNKYAMNWVRQAPGKGLEWVARIR |
| | | | SKYNNYATYYADSVKDRFTISRDDSKNTAYLQMNNLKTEDTAVYYCVRHGNFGNSYISYWAY |
| | | | WGQGTLVTVSSGGGGSGGGGSGGGGSQTVVTQEPSLTVSPGGTVTLTCGSSTGAVTSGNYPN |
| | | | WVQQKPGQAPRGLIGGTKFLAPGTPARFSGSLLGGKAALTLSGVQPEDEAEYYCVLWYSNRW |
| | | | VFGGGTKLTVL |
| 164 | IX9/HLE | ARTIFICIAL | EIVLTQSPGTLSLSPGERATLSCRASQTVSSSYLVWYQQKPGQAPRLLIYGASSRATGIPDR |
| | BITE I2C | | FSGSGSGTDFTLTISRLEPEDFAVYYCQQYGGSPITFGCGTRLEIKGGGGSGGGGSGGGGSQ |
| | | | VQLVQSGAEVKKPGASVKVSCKASGYTFTGYYMHWVRQAPGQCLEWMGWINPNSGETNYAQK |
| | | | FQGRVTMTRDTSISTAYMELSRLRSDDTAVYYCARDALIVVAPVTRDYYYYGMDVWGQGTTV |
| | | | TASSSGGGGSEVQLVESGGGLVQPGGSLKLSCAASGFTFNKYAMNWVRQAPGKGLEWVARIR |
| | | | SKYNNYATYYADSVKDRFTISRDDSKNTAYLQMNNLKTEDTAVYYCVRHGNFGNSYISYWAY |
| | | | WGQGTLVTVSSGGGGSGGGGSGGGGSQTVVTQEPSLTVSPGGTVTLTCGSSTGAVTSGNYPN |
| | | | WVQQKPGQAPRGLIGGTKFLAPGTPARFSGSLLGGKAALTLSGVQPEDEAEYYCVLWYSNRW |
| | | | VFGGGTKLTVLGGGGDKTHTCPPCPAPELLGGPSVFLFPPKPKDTLMISRTPEVTCVVVDVS |
| | | | HEDPEVKFNWYVDGVEVHNAKTKPCEEQYGSTYRCVSVLTVLHQDWLNGKEYKCKVSNKALP |
| | | | APIEKTISKAKGQPREPQVYTLPPSREEMTKNQVSLTCLVKGFYPSDIAVEWESNGQPENNY |
| | | | KTTPPVLDSDGSFFLYSKLTVDKSRWQQGNVFSCSVMHEALHNHYTQKSLSLSPGKGGGGSG |
| | | | GGGSGGGGSGGGGSGGGGSGGGGSDKTHTCPPCPAPELLGGPSVFLFPPKPKDTLMISRTPE |
| | | | VTCVVVDVSHEDPEVKFNWYVDGVEVHNAKTKPCEEQYGSTYRCVSVLTVLHQDWLNGKEYK |
| | | | CKVSNKALPAPIEKTISKAKGQPREPQVYTLPPSREEMTKNQVSLTCLVKGFYPSDIAVEWE |
| | | | SNGQPENNYKTTPPVLDSDGSFFLYSKLTVDKSRWQQGNVFSCSVMHEALHNHYTQKSLSLS |
| | | | PGK |
| 165 | G5X/VH | ARTIFICIAL | QVQLVQSGAEVKKPGASVKVSCKASGYTFTGYYMHWVRQAPGQCLEWMGWINPNSGDANYAQ |
| | | | KFQGRVTMTRDTSISTAYMELSRLRSDDTAVYYCARDALIVVAPVTRDYYYYGMDVWGQGTT |
| | | | VTVSS |
| 166 | G5X/VL | ARTIFICIAL | EIVLTQSPGTLSLSPGERATLSCRASQTVSSSYLVWYQQKPGQAPRLLIYGASSRATGIPDR |
| | | | FSGSGSGTDFTLTISRLEPEDFAVYYCQQYGGSPITFGCGTRLEIK |
| 167 | G5X/CDR-H1 | ARTIFICIAL | GYYMH |
| 168 | G5X/CDR-H2 | ARTIFICIAL | WINPNSGDANYAQKFQG |
| 169 | G5X/CDR-H3 | ARTIFICIAL | DALIVVAPVTRDYYYYGMDV |
| 170 | G5X/CDR-L1 | ARTIFICIAL | RASQTVSSSYLV |
| 171 | G5X/CDR-L2 | ARTIFICIAL | GASSRAT |
| 172 | G5X/CDR-L3 | ARTIFICIAL | QQYGGSPIT |
| 173 | G5X/SCFV | ARTIFICIAL | EIVLTQSPGTLSLSPGERATLSCRASQTVSSSYLVWYQQKPGQAPRLLIYGASSRATGIPDR |
| | I2E | | FSGSGSGTDFTLTISRLEPEDFAVYYCQQYGGSPITFGCGTRLEIKGGGGSGGGGSGGGGSQ |
| | | | VQLVQSGAEVKKPGASVKVSCKASGYTFTGYYMHWVRQAPGQCLEWMGWINPNSGDANYAQK |
| | | | FQGRVTMTRDTSISTAYMELSRLRSDDTAVYYCARDALIVVAPVTRDYYYYGMDVWGQGTTV |
| | | | TVSS |
| 174 | G5X/ | ARTIFICIAL | EIVLTQSPGTLSLSPGERATLSCRASQTVSSSYLVWYQQKPGQAPRLLIYGASSRATGIPDR |
| | BISPECIFIC | | FSGSGSGTDFTLTISRLEPEDFAVYYCQQYGGSPITFGCGTRLEIKGGGGSGGGGSGGGGSQ |
| | MOL I2E | | VQLVQSGAEVKKPGASVKVSCKASGYTFTGYYMHWVRQAPGQCLEWMGWINPNSGDANYAQK |
| | | | FQGRVTMTRDTSISTAYMELSRLRSDDTAVYYCARDALIVVAPVTRDYYYYGMDVWGQGTTV |
| | | | TVSSSGGGGSEVQLVESGGGLVQPGGSLKLSCAASGFTFNKYAINWVRQAPGKGLEWVARIR |
| | | | SKYNNYATYYADAVKDRFTISRDDSKNTVYLQMNNLKTEDTAVYYCARAGNFGSSYISYWAY |
| | | | WGQGTLVTVSSGGGGSGGGGSGGGGSQTVVTQEPSLTVSPGGTVTITCGSSTGAVTSGNYPN |
| | | | WVQKKPGQAPRGLIGGTKFLAPGTPARFSGSLSGGKAALTLSGVQPEDEAEYYCVLWYSNRW |
| | | | VFGSGTKLTVL |
| 175 | G5X/HLE- | ARTIFICIAL | EIVLTQSPGTLSLSPGERATLSCRASQTVSSSYLVWYQQKPGQAPRLLIYGASSRATGIPDR |
| | BITE I2E | | FSGSGSGTDFTLTISRLEPEDFAVYYCQQYGGSPITFGCGTRLEIKGGGGSGGGGSGGGGSQ |
| | | | VQLVQSGAEVKKPGASVKVSCKASGYTFTGYYMHWVRQAPGQCLEWMGWINPNSGDANYAQK |
| | | | FQGRVTMTRDTSISTAYMELSRLRSDDTAVYYCARDALIVVAPVTRDYYYYGMDVWGQGTTV |
| | | | TVSSSGGGGSEVQLVESGGGLVQPGGSLKLSCAASGFTFNKYAINWVRQAPGKGLEWVARIR |
| | | | SKYNNYATYYADAVKDRFTISRDDSKNTVYLQMNNLKTEDTAVYYCARAGNFGSSYISYWAY |
| | | | WGQGTLVTVSSGGGGSGGGGSGGGGSQTVVTQEPSLTVSPGGTVTITCGSSTGAVTSGNYPN |
| | | | WVQKKPGQAPRGLIGGTKFLAPGTPARFSGSLSGGKAALTLSGVQPEDEAEYYCVLWYSNRW |
| | | | VFGSGTKLTVLGGGGDKTHTCPPCPAPELLGGPSVFLFPPKPKDTLMISRTPEVTCVVVDVS |
| | | | HEDPEVKFNWYVDGVEVHNAKTKPCEEQYGSTYRCVSVLTVLHQDWLNGKEYKCKVSNKALP |
| | | | APIEKTISKAKGQPREPQVYTLPPSREEMTKNQVSLTCLVKGFYPSDIAVEWESNGQPENNY |
| | | | KTTPPVLDSDGSFFLYSKLTVDKSRWQQGNVFSCSVMHEALHNHYTQKSLSLSPGKGGGGSG |
| | | | GGGSGGGGSGGGGSGGGGSGGGGSDKTHTCPPCPAPELLGGPSVFLFPPKPKDTLMISRTPE |
| | | | VTCVVVDVSHEDPEVKFNWYVDGVEVHNAKTKPCEEQYGSTYRCVSVLTVLHQDWLNGKEYK |
| | | | CKVSNKALPAPIEKTISKAKGQPREPQVYTLPPSREEMTKNQVSLTCLVKGFYPSDIAVEWE |
| | | | SNGQPENNYKTTPPVLDSDGSFFLYSKLTVDKSRWQQGNVFSCSVMHEALHNHYTQKSLSLS |
| | | | PGK |
| 176 | G5X/SCFV | ARTIFICIAL | EIVLTQSPGTLSLSPGERATLSCRASQTVSSSYLVWYQQKPGQAPRLLIYGASSRATGIPDR |
| | I2C | | FSGSGSGTDFTLTISRLEPEDFAVYYCQQYGGSPITFGCGTRLEIKGGGGSGGGGSGGGGSQ |
| | | | VQLVQSGAEVKKPGASVKVSCKASGYTFTGYYMHWVRQAPGQCLEWMGWINPNSGDANYAQK |
| | | | FQGRVTMTRDTSISTAYMELSRLRSDDTAVYYCARDALIVVAPVTRDYYYYGMDVWGQGTTV |
| | | | TVSS |
| 177 | G5X/ | ARTIFICIAL | EIVLTQSPGTLSLSPGERATLSCRASQTVSSSYLVWYQQKPGQAPRLLIYGASSRATGIPDR |
| | BISPECIFIC | | FSGSGSGTDFTLTISRLEPEDFAVYYCQQYGGSPITFGCGTRLEIKGGGGSGGGGSGGGGSQ |
| | MOL I2C | | VQLVQSGAEVKKPGASVKVSCKASGYTFTGYYMHWVRQAPGQCLEWMGWINPNSGDANYAQK |
| | | | FQGRVTMTRDTSISTAYMELSRLRSDDTAVYYCARDALIVVAPVTRDYYYYGMDVWGQGTTV |
| | | | TVSSSGGGGSEVQLVESGGGLVQPGGSLKLSCAASGFTFNKYAMNWVRQAPGKGLEWVARIR |
| | | | SKYNNYATYYADSVKDRFTISRDDSKNTAYLQMNNLKTEDTAVYYCVRHGNFGNSYISYWAY |
| | | | WGQGTLVTVSSGGGGSGGGGSGGGGSQTVVTQEPSLTVSPGGTVTLTCGSSTGAVTSGNYPN |
| | | | WVQQKPGQAPRGLIGGTKFLAPGTPARFSGSLLGGKAALTLSGVQPEDEAEYYCVLWYSNRW |
| | | | VFGGGTKLTVL |
| 178 | G5X/HLE | ARTIFICIAL | EIVLTQSPGTLSLSPGERATLSCRASQTVSSSYLVWYQQKPGQAPRLLIYGASSRATGIPDR |
| | BITE I2C | | FSGSGSGTDFTLTISRLEPEDFAVYYCQQYGGSPITFGCGTRLEIKGGGGSGGGGSGGGGSQ |
| | | | VQLVQSGAEVKKPGASVKVSCKASGYTFTGYYMHWVRQAPGQCLEWMGWINPNSGDANYAQK |
| | | | FQGRVTMTRDTSISTAYMELSRLRSDDTAVYYCARDALIVVAPVTRDYYYYGMDVWGQGTTV |
| | | | TVSSSGGGGSEVQLVESGGGLVQPGGSLKLSCAASGFTFNKYAMNWVRQAPGKGLEWVARIR |
| | | | SKYNNYATYYADSVKDRFTISRDDSKNTAYLQMNNLKTEDTAVYYCVRHGNFGNSYISYWAY |
| | | | WGQGTLVTVSSGGGGSGGGGSGGGGSQTVVTQEPSLTVSPGGTVTLTCGSSTGAVTSGNYPN |
| | | | WVQQKPGQAPRGLIGGTKFLAPGTPARFSGSLLGGKAALTLSGVQPEDEAEYYCVLWYSNRW |
| | | | VFGGGTKLTVLGGGGDKTHTCPPCPAPELLGGPSVFLFPPKPKDTLMISRTPEVTCVVVDVS |
| | | | HEDPEVKFNWYVDGVEVHNAKTKPCEEQYGSTYRCVSVLTVLHQDWLNGKEYKCKVSNKALP |
| | | | APIEKTISKAKGQPREPQVYTLPPSREEMTKNQVSLTCLVKGFYPSDIAVEWESNGQPENNY |
| | | | KTTPPVLDSDGSFFLYSKLTVDKSRWQQGNVFSCSVMHEALHNHYTQKSLSLSPGKGGGGSG |
| | | | GGGSGGGGSGGGGSGGGGSGGGGSDKTHTCPPCPAPELLGGPSVFLFPPKPKDTLMISRTPE |
| | | | VTCVVVDVSHEDPEVKFNWYVDGVEVHNAKTKPCEEQYGSTYRCVSVLTVLHQDWLNGKEYK |
| | | | CKVSNKALPAPIEKTISKAKGQPREPQVYTLPPSREEMTKNQVSLTCLVKGFYPSDIAVEWE |
| | | | SNGQPENNYKTTPPVLDSDGSFFLYSKLTVDKSRWQQGNVFSCSVMHEALHNHYTQKSLSLS |
| | | | PGK |
| 179 | O1C/VH | ARTIFICIAL | QVQLVQSGAEVKKPGASVKVSCKASGYTFTGYYMHWVRQAPGQCLEWMGWINPNSGETNYAQ |
| | | | KFQGRVTMTRDTSISTAYMELSRLRSDDTAVYYCARDNLIVVAPVTRDYYYYGMDVWGQGTT |
| | | | VTASS |
| 180 | O1C/VL | ARTIFICIAL | EIVLTQSPGTLSLSPGERATLSCRASQTVSSSYLVWYQQKPGQAPRLLIYGASSRATGIPDR |
| | | | FSGSGSGTDFTLTISRLEPEDFAVYYCQQYGGSPITFGCGTRLEIK |
| 181 | O1C/CDR-H1 | ARTIFICIAL | GYYMH |
| 182 | O1C/CDR-H2 | ARTIFICIAL | WINPNSGETNYAQKFQG |
| 183 | O1C/CDR-H3 | ARTIFICIAL | DNLIVVAPVTRDYYYYGMDV |
| 184 | O1C/CDR-L1 | ARTIFICIAL | RASQTVSSSYLV |
| 185 | O1C/CDR-L2 | ARTIFICIAL | GASSRAT |
| 186 | O1C/CDR-L3 | ARTIFICIAL | QQYGGSPIT |
| 187 | O1C/SCFV | ARTIFICIAL | EIVLTQSPGTLSLSPGERATLSCRASQTVSSSYLVWYQQKPGQAPRLLIYGASSRATGIPDR |
| | I2E | | FSGSGSGTDFTLTISRLEPEDFAVYYCQQYGGSPITFGCGTRLEIKGGGGSGGGGSGGGGSQ |
| | | | VQLVQSGAEVKKPGASVKVSCKASGYTFTGYYMHWVRQAPGQCLEWMGWINPNSGETNYAQK |
| | | | FQGRVTMTRDTSISTAYMELSRLRSDDTAVYYCARDNLIVVAPVTRDYYYYGMDVWGQGTTV |
| | | | TASS |
| 188 | O1C/ | ARTIFICIAL | EIVLTQSPGTLSLSPGERATLSCRASQTVSSSYLVWYQQKPGQAPRLLIYGASSRATGIPDR |
| | BISPECIFIC | | FSGSGSGTDFTLTISRLEPEDFAVYYCQQYGGSPITFGCGTRLEIKGGGGSGGGGSGGGGSQ |
| | MOL I2E | | VQLVQSGAEVKKPGASVKVSCKASGYTFTGYYMHWVRQAPGQCLEWMGWINPNSGETNYAQK |
| | | | FQGRVTMTRDTSISTAYMELSRLRSDDTAVYYCARDNLIVVAPVTRDYYYYGMDVWGQGTTV |
| | | | TASSSGGGGSEVQLVESGGGLVQPGGSLKLSCAASGFTFNKYAINWVRQAPGKGLEWVARIR |
| | | | SKYNNYATYYADAVKDRFTISRDDSKNTVYLQMNNLKTEDTAVYYCARAGNFGSSYISYWAY |
| | | | WGQGTLVTVSSGGGGSGGGGSGGGGSQTVVTQEPSLTVSPGGTVTITCGSSTGAVTSGNYPN |
| | | | WVQKKPGQAPRGLIGGTKFLAPGTPARFSGSLSGGKAALTLSGVQPEDEAEYYCVLWYSNRW |
| | | | VFGSGTKLTVL |
| 189 | O1C/HLE- | ARTIFICIAL | EIVLTQSPGTLSLSPGERATLSCRASQTVSSSYLVWYQQKPGQAPRLLIYGASSRATGIPDR |
| | BITE I2E | | FSGSGSGTDFTLTISRLEPEDFAVYYCQQYGGSPITFGCGTRLEIKGGGGSGGGGSGGGGSQ |
| | | | VQLVQSGAEVKKPGASVKVSCKASGYTFTGYYMHWVRQAPGQCLEWMGWINPNSGETNYAQK |
| | | | FQGRVTMTRDTSISTAYMELSRLRSDDTAVYYCARDNLIVVAPVTRDYYYYGMDVWGQGTTV |
| | | | TASSSGGGGSEVQLVESGGGLVQPGGSLKLSCAASGFTFNKYAINWVRQAPGKGLEWVARIR |
| | | | SKYNNYATYYADAVKDRFTISRDDSKNTVYLQMNNLKTEDTAVYYCARAGNFGSSYISYWAY |
| | | | WGQGTLVTVSSGGGGSGGGGSGGGGSQTVVTQEPSLTVSPGGTVTITCGSSTGAVTSGNYPN |
| | | | WVQKKPGQAPRGLIGGTKFLAPGTPARFSGSLSGGKAALTLSGVQPEDEAEYYCVLWYSNRW |
| | | | VFGSGTKLTVLGGGGDKTHTCPPCPAPELLGGPSVFLFPPKPKDTLMISRTPEVTCVVVDVS |
| | | | HEDPEVKFNWYVDGVEVHNAKTKPCEEQYGSTYRCVSVLTVLHQDWLNGKEYKCKVSNKALP |
| | | | APIEKTISKAKGQPREPQVYTLPPSREEMTKNQVSLTCLVKGFYPSDIAVEWESNGQPENNY |
| | | | KTTPPVLDSDGSFFLYSKLTVDKSRWQQGNVFSCSVMHEALHNHYTQKSLSLSPGKGGGGSG |
| | | | GGGSGGGGSGGGGSGGGGSGGGGSDKTHTCPPCPAPELLGGPSVFLFPPKPKDTLMISRTPE |
| | | | VTCVVVDVSHEDPEVKFNWYVDGVEVHNAKTKPCEEQYGSTYRCVSVLTVLHQDWLNGKEYK |
| | | | CKVSNKALPAPIEKTISKAKGQPREPQVYTLPPSREEMTKNQVSLTCLVKGFYPSDIAVEWE |
| | | | SNGQPENNYKTTPPVLDSDGSFFLYSKLTVDKSRWQQGNVFSCSVMHEALHNHYTQKSLSLS |
| | | | PGK |
| 190 | O1C/SCFV | ARTIFICIAL | EIVLTQSPGTLSLSPGERATLSCRASQTVSSSYLVWYQQKPGQAPRLLIYGASSRATGIPDR |
| | I2C | | FSGSGSGTDFTLTISRLEPEDFAVYYCQQYGGSPITFGCGTRLEIKGGGGSGGGGSGGGGSQ |
| | | | VQLVQSGAEVKKPGASVKVSCKASGYTFTGYYMHWVRQAPGQCLEWMGWINPNSGETNYAQK |
| | | | FQGRVTMTRDTSISTAYMELSRLRSDDTAVYYCARDNLIVVAPVTRDYYYYGMDVWGQGTTV |
| | | | TASS |
| 191 | O1C/ | ARTIFICIAL | EIVLTQSPGTLSLSPGERATLSCRASQTVSSSYLVWYQQKPGQAPRLLIYGASSRATGIPDR |
| | BISPECIFIC | | FSGSGSGTDFTLTISRLEPEDFAVYYCQQYGGSPITFGCGTRLEIKGGGGSGGGGSGGGGSQ |
| | MOL I2C | | VQLVQSGAEVKKPGASVKVSCKASGYTFTGYYMHWVRQAPGQCLEWMGWINPNSGETNYAQK |
| | | | FQGRVTMTRDTSISTAYMELSRLRSDDTAVYYCARDNLIVVAPVTRDYYYYGMDVWGQGTTV |
| | | | TASS |
| 192 | O1C/HLE | ARTIFICIAL | EIVLTQSPGTLSLSPGERATLSCRASQTVSSSYLVWYQQKPGQAPRLLIYGASSRATGIPDR |
| | BITE I2C | | FSGSGSGTDFTLTISRLEPEDFAVYYCQQYGGSPITFGCGTRLEIKGGGGSGGGGSGGGGSQ |
| | | | VQLVQSGAEVKKPGASVKVSCKASGYTFTGYYMHWVRQAPGQCLEWMGWINPNSGETNYAQK |
| | | | FQGRVTMTRDTSISTAYMELSRLRSDDTAVYYCARDNLIVVAPVTRDYYYYGMDVWGQGTTV |
| | | | TASSSGGGGSEVQLVESGGGLVQPGGSLKLSCAASGFTFNKYAMNWVRQAPGKGLEWVARIR |
| | | | SKYNNYATYYADSVKDRFTISRDDSKNTAYLQMNNLKTEDTAVYYCVRHGNFGNSYISYWAY |
| | | | WGQGTLVTVSSGGGGSGGGGSGGGGSQTVVTQEPSLTVSPGGTVTLTCGSSTGAVTSGNYPN |
| | | | WVQQKPGQAPRGLIGGTKFLAPGTPARFSGSLLGGKAALTLSGVQPEDEAEYYCVLWYSNRW |
| | | | VFGGGTKLTVLGGGGDKTHTCPPCPAPELLGGPSVFLFPPKPKDTLMISRTPEVTCVVVDVS |
| | | | HEDPEVKFNWYVDGVEVHNAKTKPCEEQYGSTYRCVSVLTVLHQDWLNGKEYKCKVSNKALP |
| | | | APIEKTISKAKGQPREPQVYTLPPSREEMTKNQVSLTCLVKGFYPSDIAVEWESNGQPENNY |
| | | | KTTPPVLDSDGSFFLYSKLTVDKSRWQQGNVFSCSVMHEALHNHYTQKSLSLSPGKGGGGSG |
| | | | GGGSGGGGSGGGGSGGGGSGGGGSDKTHTCPPCPAPELLGGPSVFLFPPKPKDTLMISRTPE |
| | | | VTCVVVDVSHEDPEVKFNWYVDGVEVHNAKTKPCEEQYGSTYRCVSVLTVLHQDWLNGKEYK |
| | | | CKVSNKALPAPIEKTISKAKGQPREPQVYTLPPSREEMTKNQVSLTCLVKGFYPSDIAVEWE |
| | | | SNGQPENNYKTTPPVLDSDGSFFLYSKLTVDKSRWQQGNVFSCSVMHEALHNHYTQKSLSLS |
| | | | PGK |
| 193 | A3S/VH | ARTIFICIAL | QVQLVQSGAEVKKPGASVKVSCKASGYTFTGYYMHWVRQAPGQCLEWMGWINPNSGETNYAQ |
| | | | KFQGRVTMTRDTSISTAYMELSRLRSDDTAVYYCARDNLIVVAPVTRDYYYYGMDVWGQGTT |
| | | | VTVSS |
| 194 | A3S/VL | ARTIFICIAL | EIVLTQSPGTLSLSPGERATLSCRASQSVSSSYLAWYQQKPGQAPRLLIYGASSRATGIPDR |
| | | | FSGSGSGTDFTLTISRLEPEDFAVYYCQQYGSSPLTFGCGTKLEIK |
| 195 | A3S/CDR-H1 | ARTIFICIAL | GYYMH |
| 196 | A3S/CDR-H2 | ARTIFICIAL | WINPNSGETNYAQKFQG |
| 197 | A3S/CDR-H3 | ARTIFICIAL | DNLIVVAPVTRDYYYYGMDV |
| 198 | A3S/CDR-L1 | ARTIFICIAL | RASQSVSSSYLA |
| 199 | A3S/CDR-L2 | ARTIFICIAL | GASSRAT |
| 200 | A3S/CDR-L3 | ARTIFICIAL | QQYGSSPLT |
| 201 | A3S/SCFV | ARTIFICIAL | EIVLTQSPGTLSLSPGERATLSCRASQSVSSSYLAWYQQKPGQAPRLLIYGASSRATGIPDR |
| | I2E | | FSGSGSGTDFTLTISRLEPEDFAVYYCQQYGSSPLTFGCGTKLEIKGGGGSGGGGSGGGGSQ |
| | | | VQLVQSGAEVKKPGASVKVSCKASGYTFTGYYMHWVRQAPGQCLEWMGWINPNSGETNYAQK |
| | | | FQGRVTMTRDTSISTAYMELSRLRSDDTAVYYCARDNLIVVAPVTRDYYYYGMDVWGQGTTV |
| | | | TVSS |
| 202 | A3S/ | ARTIFICIAL | EIVLTQSPGTLSLSPGERATLSCRASQSVSSSYLAWYQQKPGQAPRLLIYGASSRATGIPDR |
| | BISPECIFIC | | FSGSGSGTDFTLTISRLEPEDFAVYYCQQYGSSPLTFGCGTKLEIKGGGGSGGGGSGGGGSQ |
| | MOL I2E | | VQLVQSGAEVKKPGASVKVSCKASGYTFTGYYMHWVRQAPGQCLEWMGWINPNSGETNYAQK |
| | | | FQGRVTMTRDTSISTAYMELSRLRSDDTAVYYCARDNLIVVAPVTRDYYYYGMDVWGQGTTV |
| | | | TVSSSGGGGSEVQLVESGGGLVQPGGSLKLSCAASGFTFNKYAINWVRQAPGKGLEWVARIR |
| | | | SKYNNYATYYADAVKDRFTISRDDSKNTVYLQMNNLKTEDTAVYYCARAGNFGSSYISYWAY |
| | | | WGQGTLVTVSSGGGGSGGGGSGGGGSQTVVTQEPSLTVSPGGTVTITCGSSTGAVTSGNYPN |
| | | | WVQKKPGQAPRGLIGGTKFLAPGTPARFSGSLSGGKAALTLSGVQPEDEAEYYCVLWYSNRW |
| | | | VFGSGTKLTVL |
| 203 | A3S/HLE- | ARTIFICIAL | EIVLTQSPGTLSLSPGERATLSCRASQSVSSSYLAWYQQKPGQAPRLLIYGASSRATGIPDR |
| | BITE I2E | | FSGSGSGTDFTLTISRLEPEDFAVYYCQQYGSSPLTFGCGTKLEIKGGGGSGGGGSGGGGSQ |
| | | | VQLVQSGAEVKKPGASVKVSCKASGYTFTGYYMHWVRQAPGQCLEWMGWINPNSGETNYAQK |
| | | | FQGRVTMTRDTSISTAYMELSRLRSDDTAVYYCARDNLIVVAPVTRDYYYYGMDVWGQGTTV |
| | | | TVSSSGGGGSEVQLVESGGGLVQPGGSLKLSCAASGFTFNKYAINWVRQAPGKGLEWVARIR |
| | | | SKYNNYATYYADAVKDRFTISRDDSKNTVYLQMNNLKTEDTAVYYCARAGNFGSSYISYWAY |
| | | | WGQGTLVTVSSGGGGSGGGGSGGGGSQTVVTQEPSLTVSPGGTVTITCGSSTGAVTSGNYPN |
| | | | WVQKKPGQAPRGLIGGTKFLAPGTPARFSGSLSGGKAALTLSGVQPEDEAEYYCVLWYSNRW |
| | | | VFGSGTKLTVLGGGGDKTHTCPPCPAPELLGGPSVFLFPPKPKDTLMISRTPEVTCVVVDVS |
| | | | HEDPEVKFNWYVDGVEVHNAKTKPCEEQYGSTYRCVSVLTVLHQDWLNGKEYKCKVSNKALP |
| | | | APIEKTISKAKGQPREPQVYTLPPSREEMTKNQVSLTCLVKGFYPSDIAVEWESNGQPENNY |
| | | | KTTPPVLDSDGSFFLYSKLTVDKSRWQQGNVFSCSVMHEALHNHYTQKSLSLSPGKGGGGSG |
| | | | GGGSGGGGSGGGGSGGGGSGGGGSDKTHTCPPCPAPELLGGPSVFLFPPKPKDTLMISRTPE |
| | | | VTCVVVDVSHEDPEVKFNWYVDGVEVHNAKTKPCEEQYGSTYRCVSVLTVLHQDWLNGKEYK |
| | | | CKVSNKALPAPIEKTISKAKGQPREPQVYTLPPSREEMTKNQVSLTCLVKGFYPSDIAVEWE |
| | | | SNGQPENNYKTTPPVLDSDGSFFLYSKLTVDKSRWQQGNVFSCSVMHEALHNHYTQKSLSLS |
| | | | PGK |
| 204 | A3S/SCFV | ARTIFICIAL | EIVLTQSPGTLSLSPGERATLSCRASQSVSSSYLAWYQQKPGQAPRLLIYGASSRATGIPDR |
| | I2C | | FSGSGSGTDFTLTISRLEPEDFAVYYCQQYGSSPLTFGCGTKLEIKGGGGSGGGGSGGGGSQ |
| | | | VQLVQSGAEVKKPGASVKVSCKASGYTFTGYYMHWVRQAPGQCLEWMGWINPNSGETNYAQK |
| | | | FQGRVTMTRDTSISTAYMELSRLRSDDTAVYYCARDNLIVVAPVTRDYYYYGMDVWGQGTTV |
| | | | TVSS |
| 205 | A3S/ | ARTIFICIAL | EIVLTQSPGTLSLSPGERATLSCRASQSVSSSYLAWYQQKPGQAPRLLIYGASSRATGIPDR |
| | BISPECIFIC | | FSGSGSGTDFTLTISRLEPEDFAVYYCQQYGSSPLTFGCGTKLEIKGGGGSGGGGSGGGGSQ |
| | MOL I2C | | VQLVQSGAEVKKPGASVKVSCKASGYTFTGYYMHWVRQAPGQCLEWMGWINPNSGETNYAQK |
| | | | FQGRVTMTRDTSISTAYMELSRLRSDDTAVYYCARDNLIVVAPVTRDYYYYGMDVWGQGTTV |
| | | | TVSSSGGGGSEVQLVESGGGLVQPGGSLKLSCAASGFTFNKYAMNWVRQAPGKGLEWVARIR |
| | | | SKYNNYATYYADSVKDRFTISRDDSKNTAYLQMNNLKTEDTAVYYCVRHGNFGNSYISYWAY |
| | | | WGQGTLVTVSSGGGGSGGGGSGGGGSQTVVTQEPSLTVSPGGTVTLTCGSSTGAVTSGNYPN |
| | | | WVQQKPGQAPRGLIGGTKFLAPGTPARFSGSLLGGKAALTLSGVQPEDEAEYYCVLWYSNRW |
| | | | VFGGGTKLTVL |
| 206 | A3S/HLE | ARTIFICIAL | EIVLTQSPGTLSLSPGERATLSCRASQSVSSSYLAWYQQKPGQAPRLLIYGASSRATGIPDR |
| | BITE I2C | | FSGSGSGTDFTLTISRLEPEDFAVYYCQQYGSSPLTFGCGTKLEIKGGGGSGGGGSGGGGSQ |
| | | | VQLVQSGAEVKKPGASVKVSCKASGYTFTGYYMHWVRQAPGQCLEWMGWINPNSGETNYAQK |
| | | | FQGRVTMTRDTSISTAYMELSRLRSDDTAVYYCARDNLIVVAPVTRDYYYYGMDVWGQGTTV |
| | | | TVSSSGGGGSEVQLVESGGGLVQPGGSLKLSCAASGFTFNKYAMNWVRQAPGKGLEWVARIR |
| | | | SKYNNYATYYADSVKDRFTISRDDSKNTAYLQMNNLKTEDTAVYYCVRHGNFGNSYISYWAY |
| | | | WGQGTLVTVSSGGGGSGGGGSGGGGSQTVVTQEPSLTVSPGGTVTLTCGSSTGAVTSGNYPN |
| | | | WVQQKPGQAPRGLIGGTKFLAPGTPARFSGSLLGGKAALTLSGVQPEDEAEYYCVLWYSNRW |
| | | | VFGGGTKLTVLGGGGDKTHTCPPCPAPELLGGPSVFLFPPKPKDTLMISRTPEVTCVVVDVS |
| | | | HEDPEVKFNWYVDGVEVHNAKTKPCEEQYGSTYRCVSVLTVLHQDWLNGKEYKCKVSNKALP |
| | | | APIEKTISKAKGQPREPQVYTLPPSREEMTKNQVSLTCLVKGFYPSDIAVEWESNGQPENNY |
| | | | KTTPPVLDSDGSFFLYSKLTVDKSRWQQGNVFSCSVMHEALHNHYTQKSLSLSPGKGGGGSG |
| | | | GGGSGGGGSGGGGSGGGGSGGGGSDKTHTCPPCPAPELLGGPSVFLFPPKPKDTLMISRTPE |
| | | | VTCVVVDVSHEDPEVKFNWYVDGVEVHNAKTKPCEEQYGSTYRCVSVLTVLHQDWLNGKEYK |
| | | | CKVSNKALPAPIEKTISKAKGQPREPQVYTLPPSREEMTKNQVSLTCLVKGFYPSDIAVEWE |
| | | | SNGQPENNYKTTPPVLDSDGSFFLYSKLTVDKSRWQQGNVFSCSVMHEALHNHYTQKSLSLS |
| | | | PGK |
| 207 | B2J/VH | ARTIFICIAL | QVQLVQSGAEVKKPGASVKVSCKASGYTFTGYYMHWVRQAPGQCLEWMGWINPNSGDANYAQ |
| | | | KFQGRVTMTRDTSISTAYMELSRLRSDDTAVYYCARDNLIVVAPVTRDYYYYGMDVWGQGTT |
| | | | VTVSS |
| 208 | B2J/VL | ARTIFICIAL | EIVLTQSPGTLSLSPGERATLSCRASQTVSSSYLVWYQQKPGQAPRLLIYGASSRATGIPDR |
| | | | FSGSGSGTDFTLTISRLEPEDFAVYYCQQYGGSPITFGCGTRLEIK |
| 209 | B2J/CDR-H1 | ARTIFICIAL | GYYMH |
| 210 | B2J/CDR-H2 | ARTIFICIAL | WINPNSGDANYAQKFQG |
| 211 | B2J/CDR-H3 | ARTIFICIAL | DNLIVVAPVTRDYYYYGMDV |
| 212 | B2J/CDR-L1 | ARTIFICIAL | RASQTVSSSYLV |
| 213 | B2J/CDR-L2 | ARTIFICIAL | GASSRAT |
| 214 | B2J/CDR-L3 | ARTIFICIAL | QQYGGSPIT |
| 215 | B2J/SCFV | ARTIFICIAL | EIVLTQSPGTLSLSPGERATLSCRASQTVSSSYLVWYQQKPGQAPRLLIYGASSRATGIPDR |
| | I2E | | FSGSGSGTDFTLTISRLEPEDFAVYYCQQYGGSPITFGCGTRLEIKGGGGSGGGGSGGGGSQ |
| | | | VQLVQSGAEVKKPGASVKVSCKASGYTFTGYYMHWVRQAPGQCLEWMGWINPNSGDANYAQK |
| | | | FQGRVTMTRDTSISTAYMELSRLRSDDTAVYYCARDNLIVVAPVTRDYYYYGMDVWGQGTTV |
| | | | TVSS |
| 216 | B2J/ | ARTIFICIAL | EIVLTQSPGTLSLSPGERATLSCRASQTVSSSYLVWYQQKPGQAPRLLIYGASSRATGIPDR |
| | BISPECIFIC | | FSGSGSGTDFTLTISRLEPEDFAVYYCQQYGGSPITFGCGTRLEIKGGGGSGGGGSGGGGSQ |
| | MOL I2E | | VQLVQSGAEVKKPGASVKVSCKASGYTFTGYYMHWVRQAPGQCLEWMGWINPNSGDANYAQK |
| | | | FQGRVTMTRDTSISTAYMELSRLRSDDTAVYYCARDNLIVVAPVTRDYYYYGMDVWGQGTTV |
| | | | TVSSSGGGGSEVQLVESGGGLVQPGGSLKLSCAASGFTFNKYAINWVRQAPGKGLEWVARIR |
| | | | SKYNNYATYYADAVKDRFTISRDDSKNTVYLQMNNLKTEDTAVYYCARAGNFGSSYISYWAY |
| | | | WGQGTLVTVSSGGGGSGGGGSGGGGSQTVVTQEPSLTVSPGGTVTITCGSSTGAVTSGNYPN |
| | | | WVQKKPGQAPRGLIGGTKFLAPGTPARFSGSLSGGKAALTLSGVQPEDEAEYYCVLWYSNRW |
| | | | VFGSGTKLTVL |
| 217 | B2J/HLE- | ARTIFICIAL | EIVLTQSPGTLSLSPGERATLSCRASQTVSSSYLVWYQQKPGQAPRLLIYGASSRATGIPDR |
| | BITE I2E | | FSGSGSGTDFTLTISRLEPEDFAVYYCQQYGGSPITFGCGTRLEIKGGGGSGGGGSGGGGSQ |
| | | | VQLVQSGAEVKKPGASVKVSCKASGYTFTGYYMHWVRQAPGQCLEWMGWINPNSGDANYAQK |
| | | | FQGRVTMTRDTSISTAYMELSRLRSDDTAVYYCARDNLIVVAPVTRDYYYYGMDVWGQGTTV |
| | | | TVSSSGGGGSEVQLVESGGGLVQPGGSLKLSCAASGFTFNKYAINWVRQAPGKGLEWVARIR |
| | | | SKYNNYATYYADAVKDRFTISRDDSKNTVYLQMNNLKTEDTAVYYCARAGNFGSSYISYWAY |
| | | | WGQGTLVTVSSGGGGSGGGGSGGGGSQTVVTQEPSLTVSPGGTVTITCGSSTGAVTSGNYPN |
| | | | WVQKKPGQAPRGLIGGTKFLAPGTPARFSGSLSGGKAALTLSGVQPEDEAEYYCVLWYSNRW |
| | | | VFGSGTKLTVLGGGGDKTHTCPPCPAPELLGGPSVFLFPPKPKDTLMISRTPEVTCVVVDVS |
| | | | HEDPEVKFNWYVDGVEVHNAKTKPCEEQYGSTYRCVSVLTVLHQDWLNGKEYKCKVSNKALP |
| | | | APIEKTISKAKGQPREPQVYTLPPSREEMTKNQVSLTCLVKGFYPSDIAVEWESNGQPENNY |
| | | | KTTPPVLDSDGSFFLYSKLTVDKSRWQQGNVFSCSVMHEALHNHYTQKSLSLSPGKGGGGSG |
| | | | GGGSGGGGSGGGGSGGGGSGGGGSDKTHTCPPCPAPELLGGPSVFLFPPKPKDTLMISRTPE |
| | | | VTCVVVDVSHEDPEVKFNWYVDGVEVHNAKTKPCEEQYGSTYRCVSVLTVLHQDWLNGKEYK |
| | | | CKVSNKALPAPIEKTISKAKGQPREPQVYTLPPSREEMTKNQVSLTCLVKGFYPSDIAVEWE |
| | | | SNGQPENNYKTTPPVLDSDGSFFLYSKLTVDKSRWQQGNVFSCSVMHEALHNHYTQKSLSLS |
| | | | PGK |
| 218 | B2J/SCFV | ARTIFICIAL | EIVLTQSPGTLSLSPGERATLSCRASQTVSSSYLVWYQQKPGQAPRLLIYGASSRATGIPDR |
| | I2C | | FSGSGSGTDFTLTISRLEPEDFAVYYCQQYGGSPITFGCGTRLEIKGGGGSGGGGSGGGGSQ |
| | | | VQLVQSGAEVKKPGASVKVSCKASGYTFTGYYMHWVRQAPGQCLEWMGWINPNSGDANYAQK |
| | | | FQGRVTMTRDTSISTAYMELSRLRSDDTAVYYCARDNLIVVAPVTRDYYYYGMDVWGQGTTV |
| | | | TVSS |
| 219 | B2J/ | ARTIFICIAL | EIVLTQSPGTLSLSPGERATLSCRASQTVSSSYLVWYQQKPGQAPRLLIYGASSRATGIPDR |
| | BISPECIFIC | | FSGSGSGTDFTLTISRLEPEDFAVYYCQQYGGSPITFGCGTRLEIKGGGGSGGGGSGGGGSQ |
| | MOL I2C | | VQLVQSGAEVKKPGASVKVSCKASGYTFTGYYMHWVRQAPGQCLEWMGWINPNSGDANYAQK |
| | | | FQGRVTMTRDTSISTAYMELSRLRSDDTAVYYCARDNLIVVAPVTRDYYYYGMDVWGQGTTV |
| | | | TVSSSGGGGSEVQLVESGGGLVQPGGSLKLSCAASGFTFNKYAMNWVRQAPGKGLEWVARIR |
| | | | SKYNNYATYYADSVKDRFTISRDDSKNTAYLQMNNLKTEDTAVYYCVRHGNFGNSYISYWAY |
| | | | WGQGTLVTVSSGGGGSGGGGSGGGGSQTVVTQEPSLTVSPGGTVTLTCGSSTGAVTSGNYPN |
| | | | WVQQKPGQAPRGLIGGTKFLAPGTPARFSGSLLGGKAALTLSGVQPEDEAEYYCVLWYSNRW |
| | | | VFGGGTKLTVL |
| 220 | B2J/HLE | ARTIFICIAL | EIVLTQSPGTLSLSPGERATLSCRASQTVSSSYLVWYQQKPGQAPRLLIYGASSRATGIPDR |
| | BITE I2C | | FSGSGSGTDFTLTISRLEPEDFAVYYCQQYGGSPITFGCGTRLEIKGGGGSGGGGSGGGGSQ |
| | | | VQLVQSGAEVKKPGASVKVSCKASGYTFTGYYMHWVRQAPGQCLEWMGWINPNSGDANYAQK |
| | | | FQGRVTMTRDTSISTAYMELSRLRSDDTAVYYCARDNLIVVAPVTRDYYYYGMDVWGQGTTV |
| | | | TVSSSGGGGSEVQLVESGGGLVQPGGSLKLSCAASGFTFNKYAMNWVRQAPGKGLEWVARIR |
| | | | SKYNNYATYYADSVKDRFTISRDDSKNTAYLQMNNLKTEDTAVYYCVRHGNFGNSYISYWAY |
| | | | WGQGTLVTVSSGGGGSGGGGSGGGGSQTVVTQEPSLTVSPGGTVTLTCGSSTGAVTSGNYPN |
| | | | WVQQKPGQAPRGLIGGTKFLAPGTPARFSGSLLGGKAALTLSGVQPEDEAEYYCVLWYSNRW |
| | | | VFGGGTKLTVLGGGGDKTHTCPPCPAPELLGGPSVFLFPPKPKDTLMISRTPEVTCVVVDVS |
| | | | HEDPEVKFNWYVDGVEVHNAKTKPCEEQYGSTYRCVSVLTVLHQDWLNGKEYKCKVSNKALP |
| | | | APIEKTISKAKGQPREPQVYTLPPSREEMTKNQVSLTCLVKGFYPSDIAVEWESNGQPENNY |
| | | | KTTPPVLDSDGSFFLYSKLTVDKSRWQQGNVFSCSVMHEALHNHYTQKSLSLSPGKGGGGSG |
| | | | GGGSGGGGSGGGGSGGGGSGGGGSDKTHTCPPCPAPELLGGPSVFLFPPKPKDTLMISRTPE |
| | | | VTCVVVDVSHEDPEVKFNWYVDGVEVHNAKTKPCEEQYGSTYRCVSVLTVLHQDWLNGKEYK |
| | | | CKVSNKALPAPIEKTISKAKGQPREPQVYTLPPSREEMTKNQVSLTCLVKGFYPSDIAVEWE |
| | | | SNGQPENNYKTTPPVLDSDGSFFLYSKLTVDKSRWQQGNVFSCSVMHEALHNHYTQKSLSLS |
| | | | PGK |
| 221 | M5E/VH | ARTIFICIAL | QVQLVQSGAEVKKPGASVKVSCKASGYTFTGYYMHWVRQAPGQCLEWMGWINPNSGDANYAQ |
| | | | KFQGRVTMTRDTSISTAYMELSRLRSDDTAVYYCARDNLIVVAPVTRDYYYYGMDVWGQGTT |
| | | | VTVSS |
| 222 | M5E/VL | ARTIFICIAL | EIVLTQSPGTLSLSPGERATLSCRASQSVSSSYLAWYQQKPGQAPRLLIYGASSRATGIPDR |
| | | | FSGSGSGTDFTLTISRLEPEDFAVYYCQQYGSSPLTFGCGTKLEIK |
| 223 | M5E/CDR-H1 | ARTIFICIAL | GYYMH |
| 224 | M5E/CDR-H2 | ARTIFICIAL | WINPNSGDANYAQKFQG |
| 225 | M5E/CDR-H3 | ARTIFICIAL | DNLIVVAPVTRDYYYYGMDV |
| 226 | M5E/CDR-L1 | ARTIFICIAL | RASQSVSSSYLA |
| 227 | M5E/CDR-L2 | ARTIFICIAL | GASSRAT |
| 228 | M5E/CDR-L3 | ARTIFICIAL | QQYGSSPLT |
| 229 | M5E/SCFV | ARTIFICIAL | EIVLTQSPGTLSLSPGERATLSCRASQSVSSSYLAWYQQKPGQAPRLLIYGASSRATGIPDR |
| | I2E | | FSGSGSGTDFTLTISRLEPEDFAVYYCQQYGSSPLTFGCGTKLEIKGGGGSGGGGSGGGGSQ |
| | | | VQLVQSGAEVKKPGASVKVSCKASGYTFTGYYMHWVRQAPGQCLEWMGWINPNSGDANYAQK |
| | | | FQGRVTMTRDTSISTAYMELSRLRSDDTAVYYCARDNLIVVAPVTRDYYYYGMDVWGQGTTV |
| | | | TVSS |
| 230 | M5E/ | ARTIFICIAL | EIVLTQSPGTLSLSPGERATLSCRASQSVSSSYLAWYQQKPGQAPRLLIYGASSRATGIPDR |
| | BISPECIFIC | | FSGSGSGTDFTLTISRLEPEDFAVYYCQQYGSSPLTFGCGTKLEIKGGGGSGGGGSGGGGSQ |
| | MOL I2E | | VQLVQSGAEVKKPGASVKVSCKASGYTFTGYYMHWVRQAPGQCLEWMGWINPNSGDANYAQK |
| | | | FQGRVTMTRDTSISTAYMELSRLRSDDTAVYYCARDNLIVVAPVTRDYYYYGMDVWGQGTTV |
| | | | TVSSSGGGGSEVQLVESGGGLVQPGGSLKLSCAASGFTFNKYAINWVRQAPGKGLEWVARIR |
| | | | SKYNNYATYYADAVKDRFTISRDDSKNTVYLQMNNLKTEDTAVYYCARAGNFGSSYISYWAY |
| | | | WGQGTLVTVSSGGGGSGGGGSGGGGSQTVVTQEPSLTVSPGGTVTITCGSSTGAVTSGNYPN |
| | | | WVQKKPGQAPRGLIGGTKFLAPGTPARFSGSLSGGKAALTLSGVQPEDEAEYYCVLWYSNRW |
| | | | VFGSGTKLTVL |
| 231 | M5E/HLE- | ARTIFICIAL | EIVLTQSPGTLSLSPGERATLSCRASQSVSSSYLAWYQQKPGQAPRLLIYGASSRATGIPDR |
| | BITE I2E | | FSGSGSGTDFTLTISRLEPEDFAVYYCQQYGSSPLTFGCGTKLEIKGGGGSGGGGSGGGGSQ |
| | | | VQLVQSGAEVKKPGASVKVSCKASGYTFTGYYMHWVRQAPGQCLEWMGWINPNSGDANYAQK |
| | | | FQGRVTMTRDTSISTAYMELSRLRSDDTAVYYCARDNLIVVAPVTRDYYYYGMDVWGQGTTV |
| | | | TVSSSGGGGSEVQLVESGGGLVQPGGSLKLSCAASGFTFNKYAINWVRQAPGKGLEWVARIR |
| | | | SKYNNYATYYADAVKDRFTISRDDSKNTVYLQMNNLKTEDTAVYYCARAGNFGSSYISYWAY |
| | | | WGQGTLVTVSSGGGGSGGGGSGGGGSQTVVTQEPSLTVSPGGTVTITCGSSTGAVTSGNYPN |
| | | | WVQKKPGQAPRGLIGGTKFLAPGTPARFSGSLSGGKAALTLSGVQPEDEAEYYCVLWYSNRW |
| | | | VFGSGTKLTVLGGGGDKTHTCPPCPAPELLGGPSVFLFPPKPKDTLMISRTPEVTCVVVDVS |
| | | | HEDPEVKFNWYVDGVEVHNAKTKPCEEQYGSTYRCVSVLTVLHQDWLNGKEYKCKVSNKALP |
| | | | APIEKTISKAKGQPREPQVYTLPPSREEMTKNQVSLTCLVKGFYPSDIAVEWESNGQPENNY |
| | | | KTTPPVLDSDGSFFLYSKLTVDKSRWQQGNVFSCSVMHEALHNHYTQKSLSLSPGKGGGGSG |
| | | | GGGSGGGGSGGGGSGGGGSGGGGSDKTHTCPPCPAPELLGGPSVFLFPPKPKDTLMISRTPE |
| | | | VTCVVVDVSHEDPEVKFNWYVDGVEVHNAKTKPCEEQYGSTYRCVSVLTVLHQDWLNGKEYK |
| | | | CKVSNKALPAPIEKTISKAKGQPREPQVYTLPPSREEMTKNQVSLTCLVKGFYPSDIAVEWE |
| | | | SNGQPENNYKTTPPVLDSDGSFFLYSKLTVDKSRWQQGNVFSCSVMHEALHNHYTQKSLSLS |
| | | | PGK |
| 232 | M5E/SCFV | ARTIFICIAL | EIVLTQSPGTLSLSPGERATLSCRASQSVSSSYLAWYQQKPGQAPRLLIYGASSRATGIPDR |
| | I2C | | FSGSGSGTDFTLTISRLEPEDFAVYYCQQYGSSPLTFGCGTKLEIKGGGGSGGGGSGGGGSQ |
| | | | VQLVQSGAEVKKPGASVKVSCKASGYTFTGYYMHWVRQAPGQCLEWMGWINPNSGDANYAQK |
| | | | FQGRVTMTRDTSISTAYMELSRLRSDDTAVYYCARDNLIVVAPVTRDYYYYGMDVWGQGTTV |
| | | | TVSS |
| 233 | M5E/ | ARTIFICIAL | EIVLTQSPGTLSLSPGERATLSCRASQSVSSSYLAWYQQKPGQAPRLLIYGASSRATGIPDR |
| | BISPECIFIC | | FSGSGSGTDFTLTISRLEPEDFAVYYCQQYGSSPLTFGCGTKLEIKGGGGSGGGGSGGGGSQ |
| | MOL I2C | | VQLVQSGAEVKKPGASVKVSCKASGYTFTGYYMHWVRQAPGQCLEWMGWINPNSGDANYAQK |
| | | | FQGRVTMTRDTSISTAYMELSRLRSDDTAVYYCARDNLIVVAPVTRDYYYYGMDVWGQGTTV |
| | | | TVSSSGGGGSEVQLVESGGGLVQPGGSLKLSCAASGFTFNKYAMNWVRQAPGKGLEWVARIR |
| | | | SKYNNYATYYADSVKDRFTISRDDSKNTAYLQMNNLKTEDTAVYYCVRHGNFGNSYISYWAY |
| | | | WGQGTLVTVSSGGGGSGGGGSGGGGSQTVVTQEPSLTVSPGGTVTLTCGSSTGAVTSGNYPN |
| | | | WVQQKPGQAPRGLIGGTKFLAPGTPARFSGSLLGGKAALTLSGVQPEDEAEYYCVLWYSNRW |
| | | | VFGGGTKLTVL |
| 234 | M5E/HLE | ARTIFICIAL | EIVLTQSPGTLSLSPGERATLSCRASQSVSSSYLAWYQQKPGQAPRLLIYGASSRATGIPDR |
| | BITE I2C | | FSGSGSGTDFTLTISRLEPEDFAVYYCQQYGSSPLTFGCGTKLEIKGGGGSGGGGSGGGGSQ |
| | | | VQLVQSGAEVKKPGASVKVSCKASGYTFTGYYMHWVRQAPGQCLEWMGWINPNSGDANYAQK |
| | | | FQGRVTMTRDTSISTAYMELSRLRSDDTAVYYCARDNLIVVAPVTRDYYYYGMDVWGQGTTV |
| | | | TVSSSGGGGSEVQLVESGGGLVQPGGSLKLSCAASGFTFNKYAMNWVRQAPGKGLEWVARIR |
| | | | SKYNNYATYYADSVKDRFTISRDDSKNTAYLQMNNLKTEDTAVYYCVRHGNFGNSYISYWAY |
| | | | WGQGTLVTVSSGGGGSGGGGSGGGGSQTVVTQEPSLTVSPGGTVTLTCGSSTGAVTSGNYPN |
| | | | WVQQKPGQAPRGLIGGTKFLAPGTPARFSGSLLGGKAALTLSGVQPEDEAEYYCVLWYSNRW |
| | | | VFGGGTKLTVLGGGGDKTHTCPPCPAPELLGGPSVFLFPPKPKDTLMISRTPEVTCVVVDVS |
| | | | HEDPEVKFNWYVDGVEVHNAKTKPCEEQYGSTYRCVSVLTVLHQDWLNGKEYKCKVSNKALP |
| | | | APIEKTISKAKGQPREPQVYTLPPSREEMTKNQVSLTCLVKGFYPSDIAVEWESNGQPENNY |
| | | | KTTPPVLDSDGSFFLYSKLTVDKSRWQQGNVFSCSVMHEALHNHYTQKSLSLSPGKGGGGSG |
| | | | GGGSGGGGSGGGGSGGGGSGGGGSDKTHTCPPCPAPELLGGPSVFLFPPKPKDTLMISRTPE |
| | | | VTCVVVDVSHEDPEVKFNWYVDGVEVHNAKTKPCEEQYGSTYRCVSVLTVLHQDWLNGKEYK |
| | | | CKVSNKALPAPIEKTISKAKGQPREPQVYTLPPSREEMTKNQVSLTCLVKGFYPSDIAVEWE |
| | | | SNGQPENNYKTTPPVLDSDGSFFLYSKLTVDKSRWQQGNVFSCSVMHEALHNHYTQKSLSLS |
| | | | PGK |
| 235 | X3A/VH | ARTIFICIAL | QVQLVQSGAEVKKPGASVKVSCKASGYTFTGYYMHWVRQAPGQCLEWMGWINPNSGDANYAQ |
| | | | KFQGRVTMTRDTSISTAYMELSRLRSDDTAVYYCARDALIVVAPVTRDYYYYGMDVWGQGTT |
| | | | VTASS |
| 236 | X3A/VL | ARTIFICIAL | EIVLTQSPGTLSLSPGERATLSCRASQTVSSSYLVWYQQKPGQAPRLLIYGASSRATGIPDR |
| | | | FSGSGSGTDFTLIISRLEPEDFAVYYCQQYGGSPITFGCGTRLEIK |
| 237 | X3A/CDR-H1 | ARTIFICIAL | GYYMH |
| 238 | X3A/CDR-H2 | ARTIFICIAL | WINPNSGDANYAQKFQG |
| 239 | X3A/CDR-H3 | ARTIFICIAL | DALIVVAPVTRDYYYYGMDV |
| 240 | X3A/CDR-L1 | ARTIFICIAL | RASQTVSSSYLV |
| 241 | X3A/CDR-L2 | ARTIFICIAL | GASSRAT |
| 242 | X3A/CDR-L3 | ARTIFICIAL | QQYGGSPIT |
| 243 | X3A/SCFV | ARTIFICIAL | EIVLTQSPGTLSLSPGERATLSCRASQTVSSSYLVWYQQKPGQAPRLLIYGASSRATGIPDR |
| | I2E | | FSGSGSGTDFTLIISRLEPEDFAVYYCQQYGGSPITFGCGTRLEIKGGGGSGGGGSGGGGSQ |
| | | | VQLVQSGAEVKKPGASVKVSCKASGYTFTGYYMHWVRQAPGQCLEWMGWINPNSGDANYAQK |
| | | | FQGRVTMTRDTSISTAYMELSRLRSDDTAVYYCARDALIVVAPVTRDYYYYGMDVWGQGTTV |
| | | | TASS |
| 244 | X3A/ | ARTIFICIAL | EIVLTQSPGTLSLSPGERATLSCRASQTVSSSYLVWYQQKPGQAPRLLIYGASSRATGIPDR |
| | BISPECIFIC | | FSGSGSGTDFTLIISRLEPEDFAVYYCQQYGGSPITFGCGTRLEIKGGGGSGGGGSGGGGSQ |
| | MOL I2E | | VQLVQSGAEVKKPGASVKVSCKASGYTFTGYYMHWVRQAPGQCLEWMGWINPNSGDANYAQK |
| | | | FQGRVTMTRDTSISTAYMELSRLRSDDTAVYYCARDALIVVAPVTRDYYYYGMDVWGQGTTV |
| | | | TASSSGGGGSEVQLVESGGGLVQPGGSLKLSCAASGFTFNKYAINWVRQAPGKGLEWVARIR |
| | | | SKYNNYATYYADAVKDRFTISRDDSKNTVYLQMNNLKTEDTAVYYCARAGNFGSSYISYWAY |
| | | | WGQGTLVTVSSGGGGSGGGGSGGGGSQTVVTQEPSLTVSPGGTVTITCGSSTGAVTSGNYPN |
| | | | WVQKKPGQAPRGLIGGTKFLAPGTPARFSGSLSGGKAALTLSGVQPEDEAEYYCVLWYSNRW |
| | | | VFGSGTKLTVL |
| 245 | X3A/HLE- | ARTIFICIAL | EIVLTQSPGTLSLSPGERATLSCRASQTVSSSYLVWYQQKPGQAPRLLIYGASSRATGIPDR |
| | BITE I2E | | FSGSGSGTDFTLIISRLEPEDFAVYYCQQYGGSPITFGCGTRLEIKGGGGSGGGGSGGGGSQ |
| | | | VQLVQSGAEVKKPGASVKVSCKASGYTFTGYYMHWVRQAPGQCLEWMGWINPNSGDANYAQK |
| | | | FQGRVTMTRDTSISTAYMELSRLRSDDTAVYYCARDALIVVAPVTRDYYYYGMDVWGQGTTV |
| | | | TASSSGGGGSEVQLVESGGGLVQPGGSLKLSCAASGFTFNKYAINWVRQAPGKGLEWVARIR |
| | | | SKYNNYATYYADAVKDRFTISRDDSKNTVYLQMNNLKTEDTAVYYCARAGNFGSSYISYWAY |
| | | | WGQGTLVTVSSGGGGSGGGGSGGGGSQTVVTQEPSLTVSPGGTVTITCGSSTGAVTSGNYPN |
| | | | WVQKKPGQAPRGLIGGTKFLAPGTPARFSGSLSGGKAALTLSGVQPEDEAEYYCVLWYSNRW |
| | | | VFGSGTKLTVLGGGGDKTHTCPPCPAPELLGGPSVFLFPPKPKDTLMISRTPEVTCVVVDVS |
| | | | HEDPEVKFNWYVDGVEVHNAKTKPCEEQYGSTYRCVSVLTVLHQDWLNGKEYKCKVSNKALP |
| | | | APIEKTISKAKGQPREPQVYTLPPSREEMTKNQVSLTCLVKGFYPSDIAVEWESNGQPENNY |
| | | | KTTPPVLDSDGSFFLYSKLTVDKSRWQQGNVFSCSVMHEALHNHYTQKSLSLSPGKGGGGSG |
| | | | GGGSGGGGSGGGGSGGGGSGGGGSDKTHTCPPCPAPELLGGPSVFLFPPKPKDTLMISRTPE |
| | | | VTCVVVDVSHEDPEVKFNWYVDGVEVHNAKTKPCEEQYGSTYRCVSVLTVLHQDWLNGKEYK |
| | | | CKVSNKALPAPIEKTISKAKGQPREPQVYTLPPSREEMTKNQVSLTCLVKGFYPSDIAVEWE |
| | | | SNGQPENNYKTTPPVLDSDGSFFLYSKLTVDKSRWQQGNVFSCSVMHEALHNHYTQKSLSLS |
| | | | PGK |
| 246 | X3A/SCFV | ARTIFICIAL | EIVLTQSPGTLSLSPGERATLSCRASQTVSSSYLVWYQQKPGQAPRLLIYGASSRATGIPDR |
| | I2C | | FSGSGSGTDFTLIISRLEPEDFAVYYCQQYGGSPITFGCGTRLEIKGGGGSGGGGSGGGGSQ |
| | | | VQLVQSGAEVKKPGASVKVSCKASGYTFTGYYMHWVRQAPGQCLEWMGWINPNSGDANYAQK |
| | | | FQGRVTMTRDTSISTAYMELSRLRSDDTAVYYCARDALIVVAPVTRDYYYYGMDVWGQGTTV |
| | | | TASS |
| 247 | X3A/ | ARTIFICIAL | EIVLTQSPGTLSLSPGERATLSCRASQTVSSSYLVWYQQKPGQAPRLLIYGASSRATGIPDR |
| | BISPECIFIC | | FSGSGSGTDFTLIISRLEPEDFAVYYCQQYGGSPITFGCGTRLEIKGGGGSGGGGSGGGGSQ |
| | MOL I2C | | VQLVQSGAEVKKPGASVKVSCKASGYTFTGYYMHWVRQAPGQCLEWMGWINPNSGDANYAQK |
| | | | FQGRVTMTRDTSISTAYMELSRLRSDDTAVYYCARDALIVVAPVTRDYYYYGMDVWGQGTTV |
| | | | TASSSGGGGSEVQLVESGGGLVQPGGSLKLSCAASGFTFNKYAMNWVRQAPGKGLEWVARIR |
| | | | SKYNNYATYYADSVKDRFTISRDDSKNTAYLQMNNLKTEDTAVYYCVRHGNFGNSYISYWAY |
| | | | WGQGTLVTVSSGGGGSGGGGSGGGGSQTVVTQEPSLTVSPGGTVTLTCGSSTGAVTSGNYPN |
| | | | WVQQKPGQAPRGLIGGTKFLAPGTPARFSGSLLGGKAALTLSGVQPEDEAEYYCVLWYSNRW |
| | | | VFGGGTKLTVL |
| 248 | X3A/HLE | ARTIFICIAL | EIVLTQSPGTLSLSPGERATLSCRASQTVSSSYLVWYQQKPGQAPRLLIYGASSRATGIPDR |
| | BITE I2C | | FSGSGSGTDFTLIISRLEPEDFAVYYCQQYGGSPITFGCGTRLEIKGGGGSGGGGSGGGGSQ |
| | | | VQLVQSGAEVKKPGASVKVSCKASGYTFTGYYMHWVRQAPGQCLEWMGWINPNSGDANYAQK |
| | | | FQGRVTMTRDTSISTAYMELSRLRSDDTAVYYCARDALIVVAPVTRDYYYYGMDVWGQGTTV |
| | | | TASSSGGGGSEVQLVESGGGLVQPGGSLKLSCAASGFTFNKYAMNWVRQAPGKGLEWVARIR |
| | | | SKYNNYATYYADSVKDRFTISRDDSKNTAYLQMNNLKTEDTAVYYCVRHGNFGNSYISYWAY |
| | | | WGQGTLVTVSSGGGGSGGGGSGGGGSQTVVTQEPSLTVSPGGTVTLTCGSSTGAVTSGNYPN |
| | | | WVQQKPGQAPRGLIGGTKFLAPGTPARFSGSLLGGKAALTLSGVQPEDEAEYYCVLWYSNRW |
| | | | VFGGGTKLTVLGGGGDKTHTCPPCPAPELLGGPSVFLFPPKPKDTLMISRTPEVTCVVVDVS |
| | | | HEDPEVKFNWYVDGVEVHNAKTKPCEEQYGSTYRCVSVLTVLHQDWLNGKEYKCKVSNKALP |
| | | | APIEKTISKAKGQPREPQVYTLPPSREEMTKNQVSLTCLVKGFYPSDIAVEWESNGQPENNY |
| | | | KTTPPVLDSDGSFFLYSKLTVDKSRWQQGNVFSCSVMHEALHNHYTQKSLSLSPGKGGGGSG |
| | | | GGGSGGGGSGGGGSGGGGSGGGGSDKTHTCPPCPAPELLGGPSVFLFPPKPKDTLMISRTPE |
| | | | VTCVVVDVSHEDPEVKFNWYVDGVEVHNAKTKPCEEQYGSTYRCVSVLTVLHQDWLNGKEYK |
| | | | CKVSNKALPAPIEKTISKAKGQPREPQVYTLPPSREEMTKNQVSLTCLVKGFYPSDIAVEWE |
| | | | SNGQPENNYKTTPPVLDSDGSFFLYSKLTVDKSRWQQGNVFSCSVMHEALHNHYTQKSLSLS |
| | | | PGK |
| 249 | S9W/VH | ARTIFICIAL | QVQLVQSGAEVKKPGASVKVSCKASGYTFTGYYMHWVRQAPGQCLEWMGWINPNSGDANYAQ |
| | | | KFQGRVTMTRDTSISTAYMELSRLRSDDTAVYYCARDALIVVAPVTRDYYYYGMDVWGQGTT |
| | | | VTASS |
| 250 | S9W/VL | ARTIFICIAL | EIVLTQSPGTLSLSPGERATLSCRASQSVSSSYLAWYQQKPGQAPRLLIYGASSRATGIPDR |
| | | | FSGSGSGTDFTLTISRLEPEDFAVYYCQQYGSSPLTFGCGTKLEIK |
| 251 | S9W/CDR-H1 | ARTIFICIAL | GYYMH |
| 252 | S9W/CDR-H2 | ARTIFICIAL | WINPNSGDANYAQKFQG |
| 253 | S9W/CDR-H3 | ARTIFICIAL | DALIVVAPVTRDYYYYGMDV |
| 254 | S9W/CDR-L1 | ARTIFICIAL | RASQSVSSSYLA |
| 255 | S9W/CDR-L2 | ARTIFICIAL | GASSRAT |
| 256 | S9W/CDR-L3 | ARTIFICIAL | QQYGSSPLT |
| 257 | S9W/SCFV | ARTIFICIAL | EIVLTQSPGTLSLSPGERATLSCRASQSVSSSYLAWYQQKPGQAPRLLIYGASSRATGIPDR |
| | I2E | | FSGSGSGTDFTLTISRLEPEDFAVYYCQQYGSSPLTFGCGTKLEIKGGGGSGGGGSGGGGSQ |
| | | | VQLVQSGAEVKKPGASVKVSCKASGYTFTGYYMHWVRQAPGQCLEWMGWINPNSGDANYAQK |
| | | | FQGRVTMTRDTSISTAYMELSRLRSDDTAVYYCARDALIVVAPVTRDYYYYGMDVWGQGTTV |
| | | | TASS |
| 258 | S9W/ | ARTIFICIAL | EIVLTQSPGTLSLSPGERATLSCRASQSVSSSYLAWYQQKPGQAPRLLIYGASSRATGIPDR |
| | BISPECIFIC | | FSGSGSGTDFTLTISRLEPEDFAVYYCQQYGSSPLTFGCGTKLEIKGGGGSGGGGSGGGGSQ |
| | MOL I2E | | VQLVQSGAEVKKPGASVKVSCKASGYTFTGYYMHWVRQAPGQCLEWMGWINPNSGDANYAQK |
| | | | FQGRVTMTRDTSISTAYMELSRLRSDDTAVYYCARDALIVVAPVTRDYYYYGMDVWGQGTTV |
| | | | TASSSGGGGSEVQLVESGGGLVQPGGSLKLSCAASGFTFNKYAINWVRQAPGKGLEWVARIR |
| | | | SKYNNYATYYADAVKDRFTISRDDSKNTVYLQMNNLKTEDTAVYYCARAGNFGSSYISYWAY |
| | | | WGQGTLVTVSSGGGGSGGGGSGGGGSQTVVTQEPSLTVSPGGTVTITCGSSTGAVTSGNYPN |
| | | | WVQKKPGQAPRGLIGGTKFLAPGTPARFSGSLSGGKAALTLSGVQPEDEAEYYCVLWYSNRW |
| | | | VFGSGTKLTVL |
| 259 | S9W/HLE- | ARTIFICIAL | EIVLTQSPGTLSLSPGERATLSCRASQSVSSSYLAWYQQKPGQAPRLLIYGASSRATGIPDR |
| | BITE I2E | | FSGSGSGTDFTLTISRLEPEDFAVYYCQQYGSSPLTFGCGTKLEIKGGGGSGGGGSGGGGSQ |
| | | | VQLVQSGAEVKKPGASVKVSCKASGYTFTGYYMHWVRQAPGQCLEWMGWINPNSGDANYAQK |
| | | | FQGRVTMTRDTSISTAYMELSRLRSDDTAVYYCARDALIVVAPVTRDYYYYGMDVWGQGTTV |
| | | | TASSSGGGGSEVQLVESGGGLVQPGGSLKLSCAASGFTFNKYAINWVRQAPGKGLEWVARIR |
| | | | SKYNNYATYYADAVKDRFTISRDDSKNTVYLQMNNLKTEDTAVYYCARAGNFGSSYISYWAY |
| | | | WGQGTLVTVSSGGGGSGGGGSGGGGSQTVVTQEPSLTVSPGGTVTITCGSSTGAVTSGNYPN |
| | | | WVQKKPGQAPRGLIGGTKFLAPGTPARFSGSLSGGKAALTLSGVQPEDEAEYYCVLWYSNRW |
| | | | VFGSGTKLTVLGGGGDKTHTCPPCPAPELLGGPSVFLFPPKPKDTLMISRTPEVTCVVVDVS |
| | | | HEDPEVKFNWYVDGVEVHNAKTKPCEEQYGSTYRCVSVLTVLHQDWLNGKEYKCKVSNKALP |
| | | | APIEKTISKAKGQPREPQVYTLPPSREEMTKNQVSLTCLVKGFYPSDIAVEWESNGQPENNY |
| | | | KTTPPVLDSDGSFFLYSKLTVDKSRWQQGNVFSCSVMHEALHNHYTQKSLSLSPGKGGGGSG |
| | | | GGGSGGGGSGGGGSGGGGSGGGGSDKTHTCPPCPAPELLGGPSVFLFPPKPKDTLMISRTPE |
| | | | VTCVVVDVSHEDPEVKFNWYVDGVEVHNAKTKPCEEQYGSTYRCVSVLTVLHQDWLNGKEYK |
| | | | CKVSNKALPAPIEKTISKAKGQPREPQVYTLPPSREEMTKNQVSLTCLVKGFYPSDIAVEWE |
| | | | SNGQPENNYKTTPPVLDSDGSFFLYSKLTVDKSRWQQGNVFSCSVMHEALHNHYTQKSLSLS |
| | | | PGK |
| 260 | S9W/SCFV | ARTIFICIAL | EIVLTQSPGTLSLSPGERATLSCRASQSVSSSYLAWYQQKPGQAPRLLIYGASSRATGIPDR |
| | I2C | | FSGSGSGTDFTLTISRLEPEDFAVYYCQQYGSSPLTFGCGTKLEIKGGGGSGGGGSGGGGSQ |
| | | | VQLVQSGAEVKKPGASVKVSCKASGYTFTGYYMHWVRQAPGQCLEWMGWINPNSGDANYAQK |
| | | | FQGRVTMTRDTSISTAYMELSRLRSDDTAVYYCARDALIVVAPVTRDYYYYGMDVWGQGTTV |
| | | | TASS |
| 261 | S9W/ | ARTIFICIAL | EIVLTQSPGTLSLSPGERATLSCRASQSVSSSYLAWYQQKPGQAPRLLIYGASSRATGIPDR |
| | BISPECIFIC | | FSGSGSGTDFTLTISRLEPEDFAVYYCQQYGSSPLTFGCGTKLEIKGGGGSGGGGSGGGGSQ |
| | MOL I2C | | VQLVQSGAEVKKPGASVKVSCKASGYTFTGYYMHWVRQAPGQCLEWMGWINPNSGDANYAQK |
| | | | FQGRVTMTRDTSISTAYMELSRLRSDDTAVYYCARDALIVVAPVTRDYYYYGMDVWGQGTTV |
| | | | TASSSGGGGSEVQLVESGGGLVQPGGSLKLSCAASGFTFNKYAMNWVRQAPGKGLEWVARIR |
| | | | SKYNNYATYYADSVKDRFTISRDDSKNTAYLQMNNLKTEDTAVYYCVRHGNFGNSYISYWAY |
| | | | WGQGTLVTVSSGGGGSGGGGSGGGGSQTVVTQEPSLTVSPGGTVTLTCGSSTGAVTSGNYPN |
| | | | WVQQKPGQAPRGLIGGTKFLAPGTPARFSGSLLGGKAALTLSGVQPEDEAEYYCVLWYSNRW |
| | | | VFGGGTKLTVL |
| 262 | S9W/HLE | ARTIFICIAL | EIVLTQSPGTLSLSPGERATLSCRASQSVSSSYLAWYQQKPGQAPRLLIYGASSRATGIPDR |
| | BITE I2C | | FSGSGSGTDFTLTISRLEPEDFAVYYCQQYGSSPLTFGCGTKLEIKGGGGSGGGGSGGGGSQ |
| | | | VQLVQSGAEVKKPGASVKVSCKASGYTFTGYYMHWVRQAPGQCLEWMGWINPNSGDANYAQK |
| | | | FQGRVTMTRDTSISTAYMELSRLRSDDTAVYYCARDALIVVAPVTRDYYYYGMDVWGQGTTV |
| | | | TASSSGGGGSEVQLVESGGGLVQPGGSLKLSCAASGFTFNKYAMNWVRQAPGKGLEWVARIR |
| | | | SKYNNYATYYADSVKDRFTISRDDSKNTAYLQMNNLKTEDTAVYYCVRHGNFGNSYISYWAY |
| | | | WGQGTLVTVSSGGGGSGGGGSGGGGSQTVVTQEPSLTVSPGGTVTLTCGSSTGAVTSGNYPN |
| | | | WVQQKPGQAPRGLIGGTKFLAPGTPARFSGSLLGGKAALTLSGVQPEDEAEYYCVLWYSNRW |
| | | | VFGGGTKLTVLGGGGDKTHTCPPCPAPELLGGPSVFLFPPKPKDTLMISRTPEVTCVVVDVS |
| | | | HEDPEVKFNWYVDGVEVHNAKTKPCEEQYGSTYRCVSVLTVLHQDWLNGKEYKCKVSNKALP |
| | | | APIEKTISKAKGQPREPQVYTLPPSREEMTKNQVSLTCLVKGFYPSDIAVEWESNGQPENNY |
| | | | KTTPPVLDSDGSFFLYSKLTVDKSRWQQGNVFSCSVMHEALHNHYTQKSLSLSPGKGGGGSG |
| | | | GGGSGGGGSGGGGSGGGGSGGGGSDKTHTCPPCPAPELLGGPSVFLFPPKPKDTLMISRTPE |
| | | | VTCVVVDVSHEDPEVKFNWYVDGVEVHNAKTKPCEEQYGSTYRCVSVLTVLHQDWLNGKEYK |
| | | | CKVSNKALPAPIEKTISKAKGQPREPQVYTLPPSREEMTKNQVSLTCLVKGFYPSDIAVEWE |
| | | | SNGQPENNYKTTPPVLDSDGSFFLYSKLTVDKSRWQQGNVFSCSVMHEALHNHYTQKSLSLS |
| | | | PGK |
| 263 | I7L/VH | ARTIFICIAL | QVQLVQSGAEVKKPGASVKVSCKASGYTFTGYYVHWVRQAPGQCLEWMGWINPNSGATNYAQ |
| | | | KFQGRVTMTRDTSISTAYMELSRLRSVDTAVYYCVRDGLIVEAPATRDYYYYGMDVWGQGTT |
| | | | VTVSS |
| 264 | I7L/VL | ARTIFICIAL | EIVLTQSPGTLSLSPGERATLSCRASQSVRSTYLAWYQQTPGQAPRLLISGASSRATGIPDR |
| | | | FSGSGSGTDFILTISRLEPEDFAVYYCQQYDTSPITFGCGTRLEIK |
| 265 | I7L/CDR-H1 | ARTIFICIAL | GYYVH |
| 266 | I7L/CDR-H2 | ARTIFICIAL | WINPNSGATNYAQKFQG |
| 267 | I7L/CDR-H3 | ARTIFICIAL | DGLIVEAPATRDYYYYGMDV |
| 268 | I7L/CDR-L1 | ARTIFICIAL | RASQSVRSTYLA |
| 269 | I7L/CDR-L2 | ARTIFICIAL | GASSRAT |
| 270 | I7L/CDR-L3 | ARTIFICIAL | QQYDTSPIT |
| 271 | I7L/SCFV | ARTIFICIAL | QVQLVQSGAEVKKPGASVKVSCKASGYTFTGYYVHWVRQAPGQCLEWMGWINPNSGATNYAQ |
| | I2E | | KFQGRVTMTRDTSISTAYMELSRLRSVDTAVYYCVRDGLIVEAPATRDYYYYGMDVWGQGTT |
| | | | VTVSSGGGGSGGGGSGGGGSEIVLTQSPGTLSLSPGERATLSCRASQSVRSTYLAWYQQTPG |
| | | | QAPRLLISGASSRATGIPDRFSGSGSGTDFILTISRLEPEDFAVYYCQQYDTSPITFGCGTR |
| | | | LEIK |
| 272 | I7L/ | ARTIFICIAL | QVQLVQSGAEVKKPGASVKVSCKASGYTFTGYYVHWVRQAPGQCLEWMGWINPNSGATNYAQ |
| | BISPECIFIC | | KFQGRVTMTRDTSISTAYMELSRLRSVDTAVYYCVRDGLIVEAPATRDYYYYGMDVWGQGTT |
| | MOL I2E | | VTVSSGGGGSGGGGSGGGGSEIVLTQSPGTLSLSPGERATLSCRASQSVRSTYLAWYQQTPG |
| | | | QAPRLLISGASSRATGIPDRFSGSGSGTDFILTISRLEPEDFAVYYCQQYDTSPITFGCGTR |
| | | | LEIKSGGGGSEVQLVESGGGLVQPGGSLKLSCAASGFTFNKYAINWVRQAPGKGLEWVARIR |
| | | | SKYNNYATYYADAVKDRFTISRDDSKNTVYLQMNNLKTEDTAVYYCARAGNFGSSYISYWAY |
| | | | WGQGTLVTVSSGGGGSGGGGSGGGGSQTVVTQEPSLTVSPGGTVTITCGSSTGAVTSGNYPN |
| | | | WVQKKPGQAPRGLIGGTKFLAPGTPARFSGSLSGGKAALTLSGVQPEDEAEYYCVLWYSNRW |
| | | | VFGSGTKLTVL |
| 273 | I7L/HLE- | ARTIFICIAL | QVQLVQSGAEVKKPGASVKVSCKASGYTFTGYYVHWVRQAPGQCLEWMGWINPNSGATNYAQ |
| | BITE I2E | | KFQGRVTMTRDTSISTAYMELSRLRSVDTAVYYCVRDGLIVEAPATRDYYYYGMDVWGQGTT |
| | | | VTVSSGGGGSGGGGSGGGGSEIVLTQSPGTLSLSPGERATLSCRASQSVRSTYLAWYQQTPG |
| | | | QAPRLLISGASSRATGIPDRFSGSGSGTDFILTISRLEPEDFAVYYCQQYDTSPITFGCGTR |
| | | | LEIKSGGGGSEVQLVESGGGLVQPGGSLKLSCAASGFTFNKYAINWVRQAPGKGLEWVARIR |
| | | | SKYNNYATYYADAVKDRFTISRDDSKNTVYLQMNNLKTEDTAVYYCARAGNFGSSYISYWAY |
| | | | WGQGTLVTVSSGGGGSGGGGSGGGGSQTVVTQEPSLTVSPGGTVTITCGSSTGAVTSGNYPN |
| | | | WVQKKPGQAPRGLIGGTKFLAPGTPARFSGSLSGGKAALTLSGVQPEDEAEYYCVLWYSNRW |
| | | | VFGSGTKLTVLGGGGDKTHTCPPCPAPELLGGPSVFLFPPKPKDTLMISRTPEVTCVVVDVS |
| | | | HEDPEVKFNWYVDGVEVHNAKTKPCEEQYGSTYRCVSVLTVLHQDWLNGKEYKCKVSNKALP |
| | | | APIEKTISKAKGQPREPQVYTLPPSREEMTKNQVSLTCLVKGFYPSDIAVEWESNGQPENNY |
| | | | KTTPPVLDSDGSFFLYSKLTVDKSRWQQGNVFSCSVMHEALHNHYTQKSLSLSPGKGGGGSG |
| | | | GGGSGGGGSGGGGSGGGGSGGGGSDKTHTCPPCPAPELLGGPSVFLFPPKPKDTLMISRTPE |
| | | | VTCVVVDVSHEDPEVKFNWYVDGVEVHNAKTKPCEEQYGSTYRCVSVLTVLHQDWLNGKEYK |
| | | | CKVSNKALPAPIEKTISKAKGQPREPQVYTLPPSREEMTKNQVSLTCLVKGFYPSDIAVEWE |
| | | | SNGQPENNYKTTPPVLDSDGSFFLYSKLTVDKSRWQQGNVFSCSVMHEALHNHYTQKSLSLS |
| | | | PGK |
| 274 | I7L/SCFV | ARTIFICIAL | QVQLVQSGAEVKKPGASVKVSCKASGYTFTGYYVHWVRQAPGQCLEWMGWINPNSGATNYAQ |
| | I2C | | KFQGRVTMTRDTSISTAYMELSRLRSVDTAVYYCVRDGLIVEAPATRDYYYYGMDVWGQGTT |
| | | | VTVSSGGGGSGGGGSGGGGSEIVLTQSPGTLSLSPGERATLSCRASQSVRSTYLAWYQQTPG |
| | | | QAPRLLISGASSRATGIPDRFSGSGSGTDFILTISRLEPEDFAVYYCQQYDTSPITFGCGTR |
| | | | LEIK |
| 275 | I7L/ | ARTIFICIAL | QVQLVQSGAEVKKPGASVKVSCKASGYTFTGYYVHWVRQAPGQCLEWMGWINPNSGATNYAQ |
| | BISPECIFIC | | KFQGRVTMTRDTSISTAYMELSRLRSVDTAVYYCVRDGLIVEAPATRDYYYYGMDVWGQGTT |
| | MOL I2C | | VTVSSGGGGSGGGGSGGGGSEIVLTQSPGTLSLSPGERATLSCRASQSVRSTYLAWYQQTPG |
| | | | QAPRLLISGASSRATGIPDRFSGSGSGTDFILTISRLEPEDFAVYYCQQYDTSPITFGCGTR |
| | | | LEIKSGGGGSEVQLVESGGGLVQPGGSLKLSCAASGFTFNKYAMNWVRQAPGKGLEWVARIR |
| | | | SKYNNYATYYADSVKDRFTISRDDSKNTAYLQMNNLKTEDTAVYYCVRHGNFGNSYISYWAY |
| | | | WGQGTLVTVSSGGGGSGGGGSGGGGSQTVVTQEPSLTVSPGGTVTLTCGSSTGAVTSGNYPN |
| | | | WVQQKPGQAPRGLIGGTKFLAPGTPARFSGSLLGGKAALTLSGVQPEDEAEYYCVLWYSNRW |
| | | | VFGGGTKLTVL |
| 276 | I7L/HLE | ARTIFICIAL | QVQLVQSGAEVKKPGASVKVSCKASGYTFTGYYVHWVRQAPGQCLEWMGWINPNSGATNYAQ |
| | BITE I2C | | KFQGRVTMTRDTSISTAYMELSRLRSVDTAVYYCVRDGLIVEAPATRDYYYYGMDVWGQGTT |
| | | | VTVSSGGGGSGGGGSGGGGSEIVLTQSPGTLSLSPGERATLSCRASQSVRSTYLAWYQQTPG |
| | | | QAPRLLISGASSRATGIPDRFSGSGSGTDFILTISRLEPEDFAVYYCQQYDTSPITFGCGTR |
| | | | LEIKSGGGGSEVQLVESGGGLVQPGGSLKLSCAASGFTFNKYAMNWVRQAPGKGLEWVARIR |
| | | | SKYNNYATYYADSVKDRFTISRDDSKNTAYLQMNNLKTEDTAVYYCVRHGNFGNSYISYWAY |
| | | | WGQGTLVTVSSGGGGSGGGGSGGGGSQTVVTQEPSLTVSPGGTVTLTCGSSTGAVTSGNYPN |
| | | | WVQQKPGQAPRGLIGGTKFLAPGTPARFSGSLLGGKAALTLSGVQPEDEAEYYCVLWYSNRW |
| | | | VFGGGTKLTVLGGGGDKTHTCPPCPAPELLGGPSVFLFPPKPKDTLMISRTPEVTCVVVDVS |
| | | | HEDPEVKFNWYVDGVEVHNAKTKPCEEQYGSTYRCVSVLTVLHQDWLNGKEYKCKVSNKALP |
| | | | APIEKTISKAKGQPREPQVYTLPPSREEMTKNQVSLTCLVKGFYPSDIAVEWESNGQPENNY |
| | | | KTTPPVLDSDGSFFLYSKLTVDKSRWQQGNVFSCSVMHEALHNHYTQKSLSLSPGKGGGGSG |
| | | | GGGSGGGGSGGGGSGGGGSGGGGSDKTHTCPPCPAPELLGGPSVFLFPPKPKDTLMISRTPE |
| | | | VTCVVVDVSHEDPEVKFNWYVDGVEVHNAKTKPCEEQYGSTYRCVSVLTVLHQDWLNGKEYK |
| | | | CKVSNKALPAPIEKTISKAKGQPREPQVYTLPPSREEMTKNQVSLTCLVKGFYPSDIAVEWE |
| | | | SNGQPENNYKTTPPVLDSDGSFFLYSKLTVDKSRWQQGNVFSCSVMHEALHNHYTQKSLSLS |
| | | | PGK |
| 277 | W5F/VH | ARTIFICIAL | QVQLVQSGAEVKKPGASVKVSCKASGYTFTGYYMHWVRQAPGQCLEWMGWINPNSGDTNYAQ |
| | | | KFQGRVTMTRDTSISTAYMELSRLRSDDTAVYYCARDGLIVVAPVTRDYYYYGMDVWGQGTT |
| | | | VTASS |
| 278 | W5F/VL | ARTIFICIAL | EIVLTQSPGTLSLSPGERATLSCRASQTVSSSYLVWYQQKPGQAPRLLIYGASSRATGIPDR |
| | | | FSGSGSGTDFTLIISRLEPEDFAVYYCQQYGGSPITFGCGTRLEIK |
| 279 | W5F/CDR-H1 | ARTIFICIAL | GYYMH |
| 280 | W5F/CDR-H2 | ARTIFICIAL | WINPNSGDTNYAQKFQG |
| 281 | W5F/CDR-H3 | ARTIFICIAL | DGLIVVAPVTRDYYYYGMDV |
| 282 | W5F/CDR-L1 | ARTIFICIAL | RASQTVSSSYLV |
| 283 | W5F/CDR-L2 | ARTIFICIAL | GASSRAT |
| 284 | W5F/CDR-L3 | ARTIFICIAL | QQYGGSPIT |
| 285 | W5F/SCFV | ARTIFICIAL | EIVLTQSPGTLSLSPGERATLSCRASQTVSSSYLVWYQQKPGQAPRLLIYGASSRATGIPDR |
| | I2E | | FSGSGSGTDFTLIISRLEPEDFAVYYCQQYGGSPITFGCGTRLEIKGGGGSGGGGSGGGGSQ |
| | | | VQLVQSGAEVKKPGASVKVSCKASGYTFTGYYMHWVRQAPGQCLEWMGWINPNSGDTNYAQK |
| | | | FQGRVTMTRDTSISTAYMELSRLRSDDTAVYYCARDGLIVVAPVTRDYYYYGMDVWGQGTTV |
| | | | TASS |
| 286 | W5F/ | ARTIFICIAL | EIVLTQSPGTLSLSPGERATLSCRASQTVSSSYLVWYQQKPGQAPRLLIYGASSRATGIPDR |
| | BISPECIFIC | | FSGSGSGTDFTLIISRLEPEDFAVYYCQQYGGSPITFGCGTRLEIKGGGGSGGGGSGGGGSQ |
| | MOL I2E | | VQLVQSGAEVKKPGASVKVSCKASGYTFTGYYMHWVRQAPGQCLEWMGWINPNSGDTNYAQK |
| | | | FQGRVTMTRDTSISTAYMELSRLRSDDTAVYYCARDGLIVVAPVTRDYYYYGMDVWGQGTTV |
| | | | TASSSGGGGSEVQLVESGGGLVQPGGSLKLSCAASGFTFNKYAINWVRQAPGKGLEWVARIR |
| | | | SKYNNYATYYADAVKDRFTISRDDSKNTVYLQMNNLKTEDTAVYYCARAGNFGSSYISYWAY |
| | | | WGQGTLVTVSSGGGGSGGGGSGGGGSQTVVTQEPSLTVSPGGTVTITCGSSTGAVTSGNYPN |
| | | | WVQKKPGQAPRGLIGGTKFLAPGTPARFSGSLSGGKAALTLSGVQPEDEAEYYCVLWYSNRW |
| | | | VFGSGTKLTVL |
| 287 | W5F/HLE- | ARTIFICIAL | EIVLTQSPGTLSLSPGERATLSCRASQTVSSSYLVWYQQKPGQAPRLLIYGASSRATGIPDR |
| | BITE I2E | | FSGSGSGTDFTLIISRLEPEDFAVYYCQQYGGSPITFGCGTRLEIKGGGGSGGGGSGGGGSQ |
| | | | VQLVQSGAEVKKPGASVKVSCKASGYTFTGYYMHWVRQAPGQCLEWMGWINPNSGDTNYAQK |
| | | | FQGRVTMTRDTSISTAYMELSRLRSDDTAVYYCARDGLIVVAPVTRDYYYYGMDVWGQGTTV |
| | | | TASSSGGGGSEVQLVESGGGLVQPGGSLKLSCAASGFTFNKYAINWVRQAPGKGLEWVARIR |
| | | | SKYNNYATYYADAVKDRFTISRDDSKNTVYLQMNNLKTEDTAVYYCARAGNFGSSYISYWAY |
| | | | WGQGTLVTVSSGGGGSGGGGSGGGGSQTVVTQEPSLTVSPGGTVTITCGSSTGAVTSGNYPN |
| | | | WVQKKPGQAPRGLIGGTKFLAPGTPARFSGSLSGGKAALTLSGVQPEDEAEYYCVLWYSNRW |
| | | | VFGSGTKLTVLGGGGDKTHTCPPCPAPELLGGPSVFLFPPKPKDTLMISRTPEVTCVVVDVS |
| | | | HEDPEVKFNWYVDGVEVHNAKTKPCEEQYGSTYRCVSVLTVLHQDWLNGKEYKCKVSNKALP |
| | | | APIEKTISKAKGQPREPQVYTLPPSREEMTKNQVSLTCLVKGFYPSDIAVEWESNGQPENNY |
| | | | KTTPPVLDSDGSFFLYSKLTVDKSRWQQGNVFSCSVMHEALHNHYTQKSLSLSPGKGGGGSG |
| | | | GGGSGGGGSGGGGSGGGGSGGGGSDKTHTCPPCPAPELLGGPSVFLFPPKPKDTLMISRTPE |
| | | | VTCVVVDVSHEDPEVKFNWYVDGVEVHNAKTKPCEEQYGSTYRCVSVLTVLHQDWLNGKEYK |
| | | | CKVSNKALPAPIEKTISKAKGQPREPQVYTLPPSREEMTKNQVSLTCLVKGFYPSDIAVEWE |
| | | | SNGQPENNYKTTPPVLDSDGSFFLYSKLTVDKSRWQQGNVFSCSVMHEALHNHYTQKSLSLS |
| | | | PGK |
| 288 | W5F/SCFV | ARTIFICIAL | EIVLTQSPGTLSLSPGERATLSCRASQTVSSSYLVWYQQKPGQAPRLLIYGASSRATGIPDR |
| | I2C | | FSGSGSGTDFTLIISRLEPE |
| | | | DFAVYYCQQYGGSPITFGCGTRLEIKGGGGSGGGGSGGGGSQVQLVQSGAEVKKPGASVKVS |
| | | | CKASGYTFTGYYMHWVRQAPGQCLEWMGWINPNSGDTNYAQKFQGRVTMTRDTSISTAYMEL |
| | | | SRLRSDDTAVYYCARDGLIVVAPVTRDYYYYGMDVWGQGTTVTASS |
| 289 | W5F/ | ARTIFICIAL | EIVLTQSPGTLSLSPGERATLSCRASQTVSSSYLVWYQQKPGQAPRLLIYGASSRATGIPDR |
| | BISPECIFIC | | FSGSGSGTDFTLIISRLEPEDFAVYYCQQYGGSPITFGCGTRLEIKGGGGSGGGGSGGGGSQ |
| | MOL I2C | | VQLVQSGAEVKKPGASVKVSCKASGYTFTGYYMHWVRQAPGQCLEWMGWINPNSGDTNYAQK |
| | | | FQGRVTMTRDTSISTAYMELSRLRSDDTAVYYCARDGLIVVAPVTRDYYYYGMDVWGQGTTV |
| | | | TASSSGGGGSEVQLVESGGGLVQPGGSLKLSCAASGFTFNKYAMNWVRQAPGKGLEWVARIR |
| | | | SKYNNYATYYADSVKDRFTISRDDSKNTAYLQMNNLKTEDTAVYYCVRHGNFGNSYISYWAY |
| | | | WGQGTLVTVSSGGGGSGGGGSGGGGSQTVVTQEPSLTVSPGGTVTLTCGSSTGAVTSGNYPN |
| | | | WVQQKPGQAPRGLIGGTKFLAPGTPARFSGSLLGGKAALTLSGVQPEDEAEYYCVLWYSNRW |
| | | | VFGGGTKLTVL |
| 290 | W5F/HLE | ARTIFICIAL | EIVLTQSPGTLSLSPGERATLSCRASQTVSSSYLVWYQQKPGQAPRLLIYGASSRATGIPDR |
| | BITE I2C | | FSGSGSGTDFTLIISRLEPEDFAVYYCQQYGGSPITFGCGTRLEIKGGGGSGGGGSGGGGSQ |
| | | | VQLVQSGAEVKKPGASVKVSCKASGYTFTGYYMHWVRQAPGQCLEWMGWINPNSGDTNYAQK |
| | | | FQGRVTMTRDTSISTAYMELSRLRSDDTAVYYCARDGLIVVAPVTRDYYYYGMDVWGQGTTV |
| | | | TASSSGGGGSEVQLVESGGGLVQPGGSLKLSCAASGFTFNKYAMNWVRQAPGKGLEWVARIR |
| | | | SKYNNYATYYADSVKDRFTISRDDSKNTAYLQMNNLKTEDTAVYYCVRHGNFGNSYISYWAY |
| | | | WGQGTLVTVSSGGGGSGGGGSGGGGSQTVVTQEPSLTVSPGGTVTLTCGSSTGAVTSGNYPN |
| | | | WVQQKPGQAPRGLIGGTKFLAPGTPARFSGSLLGGKAALTLSGVQPEDEAEYYCVLWYSNRW |
| | | | VFGGGTKLTVLGGGGDKTHTCPPCPAPELLGGPSVFLFPPKPKDTLMISRTPEVTCVVVDVS |
| | | | HEDPEVKFNWYVDGVEVHNAKTKPCEEQYGSTYRCVSVLTVLHQDWLNGKEYKCKVSNKALP |
| | | | APIEKTISKAKGQPREPQVYTLPPSREEMTKNQVSLTCLVKGFYPSDIAVEWESNGQPENNY |
| | | | KTTPPVLDSDGSFFLYSKLTVDKSRWQQGNVFSCSVMHEALHNHYTQKSLSLSPGKGGGGSG |
| | | | GGGSGGGGSGGGGSGGGGSGGGGSDKTHTCPPCPAPELLGGPSVFLFPPKPKDTLMISRTPE |
| | | | VTCVVVDVSHEDPEVKFNWYVDGVEVHNAKTKPCEEQYGSTYRCVSVLTVLHQDWLNGKEYK |
| | | | CKVSNKALPAPIEKTISKAKGQPREPQVYTLPPSREEMTKNQVSLTCLVKGFYPSDIAVEWE |
| | | | SNGQPENNYKTTPPVLDSDGSFFLYSKLTVDKSRWQQGNVFSCSVMHEALHNHYTQKSLSLS |
| | | | PGK |
| 291 | K4Y/VH | ARTIFICIAL | QVQLVQSGAEVKKPGASVKVSCKASGYTFTDYHMHWVRQAPGQCLEWMGWIKPISGDANYAQ |
| | | | KFQGRVTMTRDTSISTAYMELSRLRSDDTAVYYCARDYYSSSYTLYYYYGMDVWGQGTTVTV |
| | | | SS |
| 292 | K4Y/VL | ARTIFICIAL | QSALTQPPSASGSPGQSVTISCTGTSSDVGGYNYVSWYQQHPGKAPKLMIYEVSKRPSGVPD |
| | | | RFSGSKSGNTASLTVSGLQAEDEADYYCSSYAGSNNFVFGCGTKVTVL |
| 293 | K4Y/CDR-H1 | ARTIFICIAL | DYHMH |
| 294 | K4Y/CDR-H2 | ARTIFICIAL | WIKPISGDANYAQKFQG |
| 295 | K4Y/CDR-H3 | ARTIFICIAL | DYYSSSYTLYYYYGMDV |
| 296 | K4Y/CDR-L1 | ARTIFICIAL | TGTSSDVGGYNYVS |
| 297 | K4Y/CDR-L2 | ARTIFICIAL | EVSKRPS |
| 298 | K4Y/CDR-L3 | ARTIFICIAL | SSYAGSNNFV |
| 299 | K4Y/SCFV | ARTIFICIAL | QVQLVQSGAEVKKPGASVKVSCKASGYTFTDYHMHWVRQAPGQCLEWMGWIKPISGDANYAQ |
| | I2E | | KFQGRVTMTRDTSISTAYMELSRLRSDDTAVYYCARDYYSSSYTLYYYYGMDVWGQGTTVTV |
| | | | SSGGGGSGGGGSGGGGSQSALTQPPSASGSPGQSVTISCTGTSSDVGGYNYVSWYQQHPGKA |
| | | | PKLMIYEVSKRPSGVPDRFSGSKSGNTASLTVSGLQAEDEADYYCSSYAGSNNFVFGCGTKV |
| | | | TVL |
| 300 | K4Y/ | ARTIFICIAL | QVQLVQSGAEVKKPGASVKVSCKASGYTFTDYHMHWVRQAPGQCLEWMGWIKPISGDANYAQ |
| | BISPECIFIC | | KFQGRVTMTRDTSISTAYMELSRLRSDDTAVYYCARDYYSSSYTLYYYYGMDVWGQGTTVTV |
| | MOL I2E | | SSGGGGSGGGGSGGGGSQSALTQPPSASGSPGQSVTISCTGTSSDVGGYNYVSWYQQHPGKA |
| | | | PKLMIYEVSKRPSGVPDRFSGSKSGNTASLTVSGLQAEDEADYYCSSYAGSNNFVFGCGTKV |
| | | | TVLSGGGGSEVQLVESGGGLVQPGGSLKLSCAASGFTFNKYAINWVRQAPGKGLEWVARIRS |
| | | | KYNNYATYYADAVKDRFTISRDDSKNTVYLQMNNLKTEDTAVYYCARAGNFGSSYISYWAYW |
| | | | GQGTLVTVSSGGGGSGGGGSGGGGSQTVVTQEPSLTVSPGGTVTITCGSSTGAVTSGNYPNW |
| | | | VQKKPGQAPRGLIGGTKFLAPGTPARFSGSLSGGKAALTLSGVQPEDEAEYYCVLWYSNRWV |
| | | | FGSGTKLTVL |
| 301 | K4Y/HLE- | ARTIFICIAL | QVQLVQSGAEVKKPGASVKVSCKASGYTFTDYHMHWVRQAPGQCLEWMGWIKPISGDANYAQ |
| | BITE I2E | | KFQGRVTMTRDTSISTAYMELSRLRSDDTAVYYCARDYYSSSYTLYYYYGMDVWGQGTTVTV |
| | | | SSGGGGSGGGGSGGGGSQSALTQPPSASGSPGQSVTISCTGTSSDVGGYNYVSWYQQHPGKA |
| | | | PKLMIYEVSKRPSGVPDRFSGSKSGNTASLTVSGLQAEDEADYYCSSYAGSNNFVFGCGTKV |
| | | | TVLSGGGGSEVQLVESGGGLVQPGGSLKLSCAASGFTFNKYAINWVRQAPGKGLEWVARIRS |
| | | | KYNNYATYYADAVKDRFTISRDDSKNTVYLQMNNLKTEDTAVYYCARAGNFGSSYISYWAYW |
| | | | GQGTLVTVSSGGGGSGGGGSGGGGSQTVVTQEPSLTVSPGGTVTITCGSSTGAVTSGNYPNW |
| | | | VQKKPGQAPRGLIGGTKFLAPGTPARFSGSLSGGKAALTLSGVQPEDEAEYYCVLWYSNRWV |
| | | | FGSGTKLTVLGGGGDKTHTCPPCPAPELLGGPSVFLFPPKPKDTLMISRTPEVTCVVVDVSH |
| | | | EDPEVKFNWYVDGVEVHNAKTKPCEEQYGSTYRCVSVLTVLHQDWLNGKEYKCKVSNKALPA |
| | | | PIEKTISKAKGQPREPQVYTLPPSREEMTKNQVSLTCLVKGFYPSDIAVEWESNGQPENNYK |
| | | | TTPPVLDSDGSFFLYSKLTVDKSRWQQGNVFSCSVMHEALHNHYTQKSLSLSPGKGGGGSGG |
| | | | GGSGGGGSGGGGSGGGGSGGGGSDKTHTCPPCPAPELLGGPSVFLFPPKPKDTLMISRTPEV |
| | | | TCVVVDVSHEDPEVKFNWYVDGVEVHNAKTKPCEEQYGSTYRCVSVLTVLHQDWLNGKEYKC |
| | | | KVSNKALPAPIEKTISKAKGQPREPQVYTLPPSREEMTKNQVSLTCLVKGFYPSDIAVEWES |
| | | | NGQPENNYKTTPPVLDSDGSFFLYSKLTVDKSRWQQGNVFSCSVMHEALHNHYTQKSLSLSP |
| | | | GK |
| 302 | K4Y/SCFV | ARTIFICIAL | QVQLVQSGAEVKKPGASVKVSCKASGYTFTDYHMHWVRQAPGQCLEWMGWIKPISGDANYAQ |
| | I2C | | KFQGRVTMTRDTSISTAYMELSRLRSDDTAVYYCARDYYSSSYTLYYYYGMDVWGQGTTVTV |
| | | | SSGGGGSGGGGSGGGGSQSALTQPPSASGSPGQSVTISCTGTSSDVGGYNYVSWYQQHPGKA |
| | | | PKLMIYEVSKRPSGVPDRFSGSKSGNTASLTVSGLQAEDEADYYCSSYAGSNNFVFGCGTKV |
| | | | TVL |
| 303 | K4Y/ | ARTIFICIAL | QVQLVQSGAEVKKPGASVKVSCKASGYTFTDYHMHWVRQAPGQCLEWMGWIKPISGDANYAQ |
| | BISPECIFIC | | KFQGRVTMTRDTSISTAYMELSRLRSDDTAVYYCARDYYSSSYTLYYYYGMDVWGQGTTVTV |
| | MOL I2C | | SSGGGGSGGGGSGGGGSQSALTQPPSASGSPGQSVTISCTGTSSDVGGYNYVSWYQQHPGKA |
| | | | PKLMIYEVSKRPSGVPDRFSGSKSGNTASLTVSGLQAEDEADYYCSSYAGSNNFVFGCGTKV |
| | | | TVLSGGGGSEVQLVESGGGLVQPGGSLKLSCAASGFTFNKYAMNWVRQAPGKGLEWVARIRS |
| | | | KYNNYATYYADSVKDRFTISRDDSKNTAYLQMNNLKTEDTAVYYCVRHGNFGNSYISYWAYW |
| | | | GQGTLVTVSSGGGGSGGGGSGGGGSQTVVTQEPSLTVSPGGTVTLTCGSSTGAVTSGNYPNW |
| | | | VQQKPGQAPRGLIGGTKFLAPGTPARFSGSLLGGKAALTLSGVQPEDEAEYYCVLWYSNRWV |
| | | | FGGGTKLTVL |
| 304 | K4Y/HLE | ARTIFICIAL | QVQLVQSGAEVKKPGASVKVSCKASGYTFTDYHMHWVRQAPGQCLEWMGWIKPISGDANYAQ |
| | BITE I2C | | KFQGRVTMTRDTSISTAYMELSRLRSDDTAVYYCARDYYSSSYTLYYYYGMDVWGQGTTVTV |
| | | | SSGGGGSGGGGSGGGGSQSALTQPPSASGSPGQSVTISCTGTSSDVGGYNYVSWYQQHPGKA |
| | | | PKLMIYEVSKRPSGVPDRFSGSKSGNTASLTVSGLQAEDEADYYCSSYAGSNNFVFGCGTKV |
| | | | TVLSGGGGSEVQLVESGGGLVQPGGSLKLSCAASGFTFNKYAMNWVRQAPGKGLEWVARIRS |
| | | | KYNNYATYYADSVKDRFTISRDDSKNTAYLQMNNLKTEDTAVYYCVRHGNFGNSYISYWAYW |
| | | | GQGTLVTVSSGGGGSGGGGSGGGGSQTVVTQEPSLTVSPGGTVTLTCGSSTGAVTSGNYPNW |
| | | | VQQKPGQAPRGLIGGTKFLAPGTPARFSGSLLGGKAALTLSGVQPEDEAEYYCVLWYSNRWV |
| | | | FGGGTKLTVLGGGGDKTHTCPPCPAPELLGGPSVFLFPPKPKDTLMISRTPEVTCVVVDVSH |
| | | | EDPEVKFNWYVDGVEVHNAKTKPCEEQYGSTYRCVSVLTVLHQDWLNGKEYKCKVSNKALPA |
| | | | PIEKTISKAKGQPREPQVYTLPPSREEMTKNQVSLTCLVKGFYPSDIAVEWESNGQPENNYK |
| | | | TTPPVLDSDGSFFLYSKLTVDKSRWQQGNVFSCSVMHEALHNHYTQKSLSLSPGKGGGGSGG |
| | | | GGSGGGGSGGGGSGGGGSGGGGSDKTHTCPPCPAPELLGGPSVFLFPPKPKDTLMISRTPEV |
| | | | TCVVVDVSHEDPEVKFNWYVDGVEVHNAKTKPCEEQYGSTYRCVSVLTVLHQDWLNGKEYKC |
| | | | KVSNKALPAPIEKTISKAKGQPREPQVYTLPPSREEMTKNQVSLTCLVKGFYPSDIAVEWES |
| | | | NGQPENNYKTTPPVLDSDGSFFLYSKLTVDKSRWQQGNVFSCSVMHEALHNHYTQKSLSLSP |
| | | | GK |
| 305 | M4B/VH | ARTIFICIAL | QVQLVQSGAEVKKPGASVKVSCKASGYTFTDYHMHWVRQAPGQCLEWMGWIKPISGDANYAQ |
| | | | KFQGRVTMTRDTSISTAYMELSRLRSDDTAVYYCARDAYSSSWTLYYYYGMDVWGQGTTVTV |
| | | | SS |
| 306 | M4B/VL | ARTIFICIAL | QSALTQPPSASGSPGQSVTISCTGTSSDVGGYNYVSWYQQHPGKAPKLMIYEVSKRPSGVPD |
| | | | RFSGSKSGNTASLTVSGLQAEDEADYYCSSYAGSNNFVFGCGTKVTVL |
| 307 | M4B/CDR-H1 | ARTIFICIAL | DYHMH |
| 308 | M4B/CDR-H2 | ARTIFICIAL | WIKPISGDANYAQKFQG |
| 309 | M4B/CDR-H3 | ARTIFICIAL | DAYSSSWTLYYYYGMDV |
| 310 | M4B/CDR-L1 | ARTIFICIAL | TGTSSDVGGYNYVS |
| 311 | M4B/CDR-L2 | ARTIFICIAL | EVSKRPS |
| 312 | M4B/CDR-L3 | ARTIFICIAL | SSYAGSNNFV |
| 313 | M4B/SCFV | ARTIFICIAL | QVQLVQSGAEVKKPGASVKVSCKASGYTFTDYHMHWVRQAPGQCLEWMGWIKPISGDANYAQ |
| | I2E | | KFQGRVTMTRDTSISTAYMELSRLRSDDTAVYYCARDAYSSSWTLYYYYGMDVWGQGTTVTV |
| | | | SSGGGGSGGGGSGGGGSQSALTQPPSASGSPGQSVTISCTGTSSDVGGYNYVSWYQQHPGKA |
| | | | PKLMIYEVSKRPSGVPDRFSGSKSGNTASLTVSGLQAEDEADYYCSSYAGSNNFVFGCGTKV |
| | | | TVI |
| 314 | M4B/ | ARTIFICIAL | QVQLVQSGAEVKKPGASVKVSCKASGYTFTDYHMHWVRQAPGQCLEWMGWIKPISGDANYAQ |
| | BISPECIFIC | | KFQGRVTMTRDTSISTAYMELSRLRSDDTAVYYCARDAYSSSWTLYYYYGMDVWGQGTTVTV |
| | MOL I2E | | SSGGGGSGGGGSGGGGSQSALTQPPSASGSPGQSVTISCTGTSSDVGGYNYVSWYQQHPGKA |
| | | | PKLMIYEVSKRPSGVPDRFSGSKSGNTASLTVSGLQAEDEADYYCSSYAGSNNFVFGCGTKV |
| | | | TVLSGGGGSEVQLVESGGGLVQPGGSLKLSCAASGFTFNKYAINWVRQAPGKGLEWVARIRS |
| | | | KYNNYATYYADAVKDRFTISRDDSKNTVYLQMNNLKTEDTAVYYCARAGNFGSSYISYWAYW |
| | | | GQGTLVTVSSGGGGSGGGGSGGGGSQTVVTQEPSLTVSPGGTVTITCGSSTGAVTSGNYPNW |
| | | | VQKKPGQAPRGLIGGTKFLAPGTPARFSGSLSGGKAALTLSGVQPEDEAEYYCVLWYSNRWV |
| | | | FGSGTKLTVL |
| 315 | M4B/HLE- | ARTIFICIAL | QVQLVQSGAEVKKPGASVKVSCKASGYTFTDYHMHWVRQAPGQCLEWMGWIKPISGDANYAQ |
| | BITE I2E | | KFQGRVTMTRDTSISTAYMELSRLRSDDTAVYYCARDAYSSSWTLYYYYGMDVWGQGTTVTV |
| | | | SSGGGGSGGGGSGGGGSQSALTQPPSASGSPGQSVTISCTGTSSDVGGYNYVSWYQQHPGKA |
| | | | PKLMIYEVSKRPSGVPDRFSGSKSGNTASLTVSGLQAEDEADYYCSSYAGSNNFVFGCGTKV |
| | | | TVLSGGGGSEVQLVESGGGLVQPGGSLKLSCAASGFTFNKYAINWVRQAPGKGLEWVARIRS |
| | | | KYNNYATYYADAVKDRFTISRDDSKNTVYLQMNNLKTEDTAVYYCARAGNFGSSYISYWAYW |
| | | | GQGTLVTVSSGGGGSGGGGSGGGGSQTVVTQEPSLTVSPGGTVTITCGSSTGAVTSGNYPNW |
| | | | VQKKPGQAPRGLIGGTKFLAPGTPARFSGSLSGGKAALTLSGVQPEDEAEYYCVLWYSNRWV |
| | | | FGSGTKLTVLGGGGDKTHTCPPCPAPELLGGPSVFLFPPKPKDTLMISRTPEVTCVVVDVSH |
| | | | EDPEVKFNWYVDGVEVHNAKTKPCEEQYGSTYRCVSVLTVLHQDWLNGKEYKCKVSNKALPA |
| | | | PIEKTISKAKGQPREPQVYTLPPSREEMTKNQVSLTCLVKGFYPSDIAVEWESNGQPENNYK |
| | | | TTPPVLDSDGSFFLYSKLTVDKSRWQQGNVFSCSVMHEALHNHYTQKSLSLSPGKGGGGSGG |
| | | | GGSGGGGSGGGGSGGGGSGGGGSDKTHTCPPCPAPELLGGPSVFLFPPKPKDTLMISRTPEV |
| | | | TCVVVDVSHEDPEVKFNWYVDGVEVHNAKTKPCEEQYGSTYRCVSVLTVLHQDWLNGKEYKC |
| | | | KVSNKALPAPIEKTISKAKGQPREPQVYTLPPSREEMTKNQVSLTCLVKGFYPSDIAVEWES |
| | | | NGQPENNYKTTPPVLDSDGSFFLYSKLTVDKSRWQQGNVFSCSVMHEALHNHYTQKSLSLSP |
| | | | GK |
| 316 | M4B/SCFV | ARTIFICIAL | QVQLVQSGAEVKKPGASVKVSCKASGYTFTDYHMHWVRQAPGQCLEWMGWIKPISGDANYAQ |
| | I2C | | KFQGRVTMTRDTSISTAYMELSRLRSDDTAVYYCARDAYSSSWTLYYYYGMDVWGQGTTVTV |
| | | | SSGGGGSGGGGSGGGGSQSALTQPPSASGSPGQSVTISCTGTSSDVGGYNYVSWYQQHPGKA |
| | | | PKLMIYEVSKRPSGVPDRFSGSKSGNTASLTVSGLQAEDEADYYCSSYAGSNNFVFGCGTKV |
| | | | TVL |
| 317 | M4B/ | ARTIFICIAL | QVQLVQSGAEVKKPGASVKVSCKASGYTFTDYHMHWVRQAPGQCLEWMGWIKPISGDANYAQ |
| | BISPECIFIC | | KFQGRVTMTRDTSISTAYMELSRLRSDDTAVYYCARDAYSSSWTLYYYYGMDVWGQGTTVTV |
| | MOL I2C | | SSGGGGSGGGGSGGGGSQSALTQPPSASGSPGQSVTISCTGTSSDVGGYNYVSWYQQHPGKA |
| | | | PKLMIYEVSKRPSGVPDRFSGSKSGNTASLTVSGLQAEDEADYYCSSYAGSNNFVFGCGTKV |
| | | | TVLSGGGGSEVQLVESGGGLVQPGGSLKLSCAASGFTFNKYAMNWVRQAPGKGLEWVARIRS |
| | | | KYNNYATYYADSVKDRFTISRDDSKNTAYLQMNNLKTEDTAVYYCVRHGNFGNSYISYWAYW |
| | | | GQGTLVTVSSGGGGSGGGGSGGGGSQTVVTQEPSLTVSPGGTVTLTCGSSTGAVTSGNYPNW |
| | | | VQQKPGQAPRGLIGGTKFLAPGTPARFSGSLLGGKAALTLSGVQPEDEAEYYCVLWYSNRWV |
| | | | FGGGTKLTVL |
| 318 | M4B/HLE | ARTIFICIAL | QVQLVQSGAEVKKPGASVKVSCKASGYTFTDYHMHWVRQAPGQCLEWMGWIKPISGDANYAQ |
| | BITE I2C | | KFQGRVTMTRDTSISTAYMELSRLRSDDTAVYYCARDAYSSSWTLYYYYGMDVWGQGTTVTV |
| | | | SSGGGGSGGGGSGGGGSQSALTQPPSASGSPGQSVTISCTGTSSDVGGYNYVSWYQQHPGKA |
| | | | PKLMIYEVSKRPSGVPDRFSGSKSGNTASLTVSGLQAEDEADYYCSSYAGSNNFVFGCGTKV |
| | | | TVLSGGGGSEVQLVESGGGLVQPGGSLKLSCAASGFTFNKYAMNWVRQAPGKGLEWVARIRS |
| | | | KYNNYATYYADSVKDRFTISRDDSKNTAYLQMNNLKTEDTAVYYCVRHGNFGNSYISYWAYW |
| | | | GQGTLVTVSSGGGGSGGGGSGGGGSQTVVTQEPSLTVSPGGTVTLTCGSSTGAVTSGNYPNW |
| | | | VQQKPGQAPRGLIGGTKFLAPGTPARFSGSLLGGKAALTLSGVQPEDEAEYYCVLWYSNRWV |
| | | | FGGGTKLTVLGGGGDKTHTCPPCPAPELLGGPSVFLFPPKPKDTLMISRTPEVTCVVVDVSH |
| | | | EDPEVKFNWYVDGVEVHNAKTKPCEEQYGSTYRCVSVLTVLHQDWLNGKEYKCKVSNKALPA |
| | | | PIEKTISKAKGQPREPQVYTLPPSREEMTKNQVSLTCLVKGFYPSDIAVEWESNGQPENNYK |
| | | | TTPPVLDSDGSFFLYSKLTVDKSRWQQGNVFSCSVMHEALHNHYTQKSLSLSPGKGGGGSGG |
| | | | GGSGGGGSGGGGSGGGGSGGGGSDKTHTCPPCPAPELLGGPSVFLFPPKPKDTLMISRTPEV |
| | | | TCVVVDVSHEDPEVKFNWYVDGVEVHNAKTKPCEEQYGSTYRCVSVLTVLHQDWLNGKEYKC |
| | | | KVSNKALPAPIEKTISKAKGQPREPQVYTLPPSREEMTKNQVSLTCLVKGFYPSDIAVEWES |
| | | | NGQPENNYKTTPPVLDSDGSFFLYSKLTVDKSRWQQGNVFSCSVMHEALHNHYTQKSLSLSP |
| | | | GK |
| 319 | B4G/VH | ARTIFICIAL | QVQLVQSGAEVKKPGASVKVSCKASGYTFTDYHMHWVRQAPGQCLEWMGWIKPISGDANYAQ |
| | | | KFQGRVTMTRDTSISTAYMELSRLRSDDTAVYYCARDAYSSSWTLYYYYGMDVWGQGTTVTV |
| | | | SS |
| 320 | B4G/VL | ARTIFICIAL | QSALTQPPSASGSPGQSVTSYCTGTSSDVGGYNYVSWYQQHPGKAPKLMIYEVSKRPSGVPD |
| | | | RFSGSKSGNTASLTVSGLQAEDEADYYCSSYAGSNNFVFGCGTKVTVL |
| 321 | B4G/CDR-H1 | ARTIFICIAL | DYHMH |
| 322 | B4G/CDR-H2 | ARTIFICIAL | WIKPISGDANYAQKFQG |
| 323 | B4G/CDR-H3 | ARTIFICIAL | DAYSSSWTLYYYYGMDV |
| 324 | B4G/CDR-L1 | ARTIFICIAL | TGTSSDVGGYNYVS |
| 325 | B4G/CDR-L2 | ARTIFICIAL | EVSKRPS |
| 326 | B4G/CDR-L3 | ARTIFICIAL | SSYAGSNNFV |
| 327 | B4G/SCFV | ARTIFICIAL | QVQLVQSGAEVKKPGASVKVSCKASGYTFTDYHMHWVRQAPGQCLEWMGWIKPISGDANYAQ |
| | I2E | | KFQGRVTMTRDTSISTAYMELSRLRSDDTAVYYCARDAYSSSWTLYYYYGMDVWGQGTTVTV |
| | | | SSGGGGSGGGGSGGGGSQSALTQPPSASGSPGQSVTSYCTGTSSDVGGYNYVSWYQQHPGKA |
| | | | PKLMIYEVSKRPSGVPDRFSGSKSGNTASLTVSGLQAEDEADYYCSSYAGSNNFVFGCGTKV |
| | | | TVL |
| 328 | B4G/ | ARTIFICIAL | QVQLVQSGAEVKKPGASVKVSCKASGYTFTDYHMHWVRQAPGQCLEWMGWIKPISGDANYAQ |
| | BISPECIFIC | | KFQGRVTMTRDTSISTAYMELSRLRSDDTAVYYCARDAYSSSWTLYYYYGMDVWGQGTTVTV |
| | MOL I2E | | SSGGGGSGGGGSGGGGSQSALTQPPSASGSPGQSVTSYCTGTSSDVGGYNYVSWYQQHPGKA |
| | | | PKLMIYEVSKRPSGVPDRFSGSKSGNTASLTVSGLQAEDEADYYCSSYAGSNNFVFGCGTKV |
| | | | TVLSGGGGSEVQLVESGGGLVQPGGSLKLSCAASGFTFNKYAINWVRQAPGKGLEWVARIRS |
| | | | KYNNYATYYADAVKDRFTISRDDSKNTVYLQMNNLKTEDTAVYYCARAGNFGSSYISYWAYW |
| | | | GQGTLVTVSSGGGGSGGGGSGGGGSQTVVTQEPSLTVSPGGTVTITCGSSTGAVTSGNYPNW |
| | | | VQKKPGQAPRGLIGGTKFLAPGTPARFSGSLSGGKAALTLSGVQPEDEAEYYCVLWYSNRWV |
| | | | FGSGTKLTVL |
| 329 | B4G/HLE- | ARTIFICIAL | QVQLVQSGAEVKKPGASVKVSCKASGYTFTDYHMHWVRQAPGQCLEWMGWIKPISGDANYAQ |
| | BITE I2E | | KFQGRVTMTRDTSISTAYMELSRLRSDDTAVYYCARDAYSSSWTLYYYYGMDVWGQGTTVTV |
| | | | SSGGGGSGGGGSGGGGSQSALTQPPSASGSPGQSVTSYCTGTSSDVGGYNYVSWYQQHPGKA |
| | | | PKLMIYEVSKRPSGVPDRFSGSKSGNTASLTVSGLQAEDEADYYCSSYAGSNNFVFGCGTKV |
| | | | TVLSGGGGSEVQLVESGGGLVQPGGSLKLSCAASGFTFNKYAINWVRQAPGKGLEWVARIRS |
| | | | KYNNYATYYADAVKDRFTISRDDSKNTVYLQMNNLKTEDTAVYYCARAGNFGSSYISYWAYW |
| | | | GQGTLVTVSSGGGGSGGGGSGGGGSQTVVTQEPSLTVSPGGTVTITCGSSTGAVTSGNYPNW |
| | | | VQKKPGQAPRGLIGGTKFLAPGTPARFSGSLSGGKAALTLSGVQPEDEAEYYCVLWYSNRWV |
| | | | FGSGTKLTVLGGGGDKTHTCPPCPAPELLGGPSVFLFPPKPKDTLMISRTPEVTCVVVDVSH |
| | | | EDPEVKFNWYVDGVEVHNAKTKPCEEQYGSTYRCVSVLTVLHQDWLNGKEYKCKVSNKALPA |
| | | | PIEKTISKAKGQPREPQVYTLPPSREEMTKNQVSLTCLVKGFYPSDIAVEWESNGQPENNYK |
| | | | TTPPVLDSDGSFFLYSKLTVDKSRWQQGNVFSCSVMHEALHNHYTQKSLSLSPGKGGGGSGG |
| | | | GGSGGGGSGGGGSGGGGSGGGGSDKTHTCPPCPAPELLGGPSVFLFPPKPKDTLMISRTPEV |
| | | | TCVVVDVSHEDPEVKFNWYVDGVEVHNAKTKPCEEQYGSTYRCVSVLTVLHQDWLNGKEYKC |
| | | | KVSNKALPAPIEKTISKAKGQPREPQVYTLPPSREEMTKNQVSLTCLVKGFYPSDIAVEWES |
| | | | NGQPENNYKTTPPVLDSDGSFFLYSKLTVDKSRWQQGNVFSCSVMHEALHNHYTQKSLSLSP |
| | | | GK |
| 330 | B4G/SCFV | ARTIFICIAL | QVQLVQSGAEVKKPGASVKVSCKASGYTFTDYHMHWVRQAPGQCLEWMGWIKPISGDANYAQ |
| | I2C | | KFQGRVTMTRDTSISTAYMELSRLRSDDTAVYYCARDAYSSSWTLYYYYGMDVWGQGTTVTV |
| | | | SSGGGGSGGGGSGGGGSQSALTQPPSASGSPGQSVTSYCTGTSSDVGGYNYVSWYQQHPGKA |
| | | | PKLMIYEVSKRPSGVPDRFSGSKSGNTASLTVSGLQAEDEADYYCSSYAGSNNFVFGCGTKV |
| | | | TVL |
| 331 | B4G/ | ARTIFICIAL | QVQLVQSGAEVKKPGASVKVSCKASGYTFTDYHMHWVRQAPGQCLEWMGWIKPISGDANYAQ |
| | BISPECIFIC | | KFQGRVTMTRDTSISTAYMELSRLRSDDTAVYYCARDAYSSSWTLYYYYGMDVWGQGTTVTV |
| | MOL I2C | | SSGGGGSGGGGSGGGGSQSALTQPPSASGSPGQSVTSYCTGTSSDVGGYNYVSWYQQHPGKA |
| | | | PKLMIYEVSKRPSGVPDRFSGSKSGNTASLTVSGLQAEDEADYYCSSYAGSNNFVFGCGTKV |
| | | | TVLSGGGGSEVQLVESGGGLVQPGGSLKLSCAASGFTFNKYAMNWVRQAPGKGLEWVARIRS |
| | | | KYNNYATYYADSVKDRFTISRDDSKNTAYLQMNNLKTEDTAVYYCVRHGNFGNSYISYWAYW |
| | | | GQGTLVTVSSGGGGSGGGGSGGGGSQTVVTQEPSLTVSPGGTVTLTCGSSTGAVTSGNYPNW |
| | | | VQQKPGQAPRGLIGGTKFLAPGTPARFSGSLLGGKAALTLSGVQPEDEAEYYCVLWYSNRWV |
| | | | FGGGTKLTVL |
| 332 | B4G/HLE | ARTIFICIAL | QVQLVQSGAEVKKPGASVKVSCKASGYTFTDYHMHWVRQAPGQCLEWMGWIKPISGDANYAQ |
| | BITE I2C | | KFQGRVTMTRDTSISTAYMELSRLRSDDTAVYYCARDAYSSSWTLYYYYGMDVWGQGTTVTV |
| | | | SSGGGGSGGGGSGGGGSQSALTQPPSASGSPGQSVTSYCTGTSSDVGGYNYVSWYQQHPGKA |
| | | | PKLMIYEVSKRPSGVPDRFSGSKSGNTASLTVSGLQAEDEADYYCSSYAGSNNFVFGCGTKV |
| | | | TVLSGGGGSEVQLVESGGGLVQPGGSLKLSCAASGFTFNKYAMNWVRQAPGKGLEWVARIRS |
| | | | KYNNYATYYADSVKDRFTISRDDSKNTAYLQMNNLKTEDTAVYYCVRHGNFGNSYISYWAYW |
| | | | GQGTLVTVSSGGGGSGGGGSGGGGSQTVVTQEPSLTVSPGGTVTLTCGSSTGAVTSGNYPNW |
| | | | VQQKPGQAPRGLIGGTKFLAPGTPARFSGSLLGGKAALTLSGVQPEDEAEYYCVLWYSNRWV |
| | | | FGGGTKLTVLGGGGDKTHTCPPCPAPELLGGPSVFLFPPKPKDTLMISRTPEVTCVVVDVSH |
| | | | EDPEVKFNWYVDGVEVHNAKTKPCEEQYGSTYRCVSVLTVLHQDWLNGKEYKCKVSNKALPA |
| | | | PIEKTISKAKGQPREPQVYTLPPSREEMTKNQVSLTCLVKGFYPSDIAVEWESNGQPENNYK |
| | | | TTPPVLDSDGSFFLYSKLTVDKSRWQQGNVFSCSVMHEALHNHYTQKSLSLSPGKGGGGSGG |
| | | | GGSGGGGSGGGGSGGGGSGGGGSDKTHTCPPCPAPELLGGPSVFLFPPKPKDTLMISRTPEV |
| | | | TCVVVDVSHEDPEVKFNWYVDGVEVHNAKTKPCEEQYGSTYRCVSVLTVLHQDWLNGKEYKC |
| | | | KVSNKALPAPIEKTISKAKGQPREPQVYTLPPSREEMTKNQVSLTCLVKGFYPSDIAVEWES |
| | | | NGQPENNYKTTPPVLDSDGSFFLYSKLTVDKSRWQQGNVFSCSVMHEALHNHYTQKSLSLSP |
| | | | GK |
| 333 | U8B/VH | ARTIFICIAL | QVQLVQSGAEVKKPGASVKVSCKASGYTFTDYHMHWVRQAPGQCLEWMGWIKPISGDANYAQ |
| | | | KFQGRVTMTRDTSISTAYMELSRLRSDDTAVYYCARDYYSSSWTLYYYYGMDVWGQGTTVTV |
| | | | SS |
| 334 | U8B/VL | ARTIFICIAL | QSALTQPPSASGSPGQSVTSYCTGTSSDVGGYNYVSWYQQHPGKAPKLMIYEVSKRPSGVPD |
| | | | RFSGSKSGNTASLTVSGLQAEDEADYYCSSYAGSNNFVFGCGTKVTVL |
| 335 | U8B/CDR-H1 | ARTIFICIAL | DYHMH |
| 336 | U8B/CDR-H2 | ARTIFICIAL | WIKPISGDANYAQKFQG |
| 337 | U8B/CDR-H3 | ARTIFICIAL | DYYSSSWTLYYYYGMDV |
| 338 | U8B/CDR-L1 | ARTIFICIAL | TGTSSDVGGYNYVS |
| 339 | U8B/CDR-L2 | ARTIFICIAL | EVSKRPS |
| 340 | U8B/CDR-L3 | ARTIFICIAL | SSYAGSNNFV |
| 341 | U8B/SCFV | ARTIFICIAL | QVQLVQSGAEVKKPGASVKVSCKASGYTFTDYHMHWVRQAPGQCLEWMGWIKPISGDANYAQ |
| | I2E | | KFQGRVTMTRDTSISTAYMELSRLRSDDTAVYYCARDYYSSSWTLYYYYGMDVWGQGTTVTV |
| | | | SSGGGGSGGGGSGGGGSQSALTQPPSASGSPGQSVTSYCTGTSSDVGGYNYVSWYQQHPGKA |
| | | | PKLMIYEVSKRPSGVPDRFSGSKSGNTASLTVSGLQAEDEADYYCSSYAGSNNFVFGCGTKV |
| | | | TVL |
| 342 | U8B/ | ARTIFICIAL | QVQLVQSGAEVKKPGASVKVSCKASGYTFTDYHMHWVRQAPGQCLEWMGWIKPISGDANYAQ |
| | BISPECIFIC | | KFQGRVTMTRDTSISTAYMELSRLRSDDTAVYYCARDYYSSSWTLYYYYGMDVWGQGTTVTV |
| | MOL I2E | | SSGGGGSGGGGSGGGGSQSALTQPPSASGSPGQSVTSYCTGTSSDVGGYNYVSWYQQHPGKA |
| | | | PKLMIYEVSKRPSGVPDRFSGSKSGNTASLTVSGLQAEDEADYYCSSYAGSNNFVFGCGTKV |
| | | | TVLSGGGGSEVQLVESGGGLVQPGGSLKLSCAASGFTFNKYAINWVRQAPGKGLEWVARIRS |
| | | | KYNNYATYYADAVKDRFTISRDDSKNTVYLQMNNLKTEDTAVYYCARAGNFGSSYISYWAYW |
| | | | GQGTLVTVSSGGGGSGGGGSGGGGSQTVVTQEPSLTVSPGGTVTITCGSSTGAVTSGNYPNW |
| | | | VQKKPGQAPRGLIGGTKFLAPGTPARFSGSLSGGKAALTLSGVQPEDEAEYYCVLWYSNRWV |
| | | | FGSGTKLTVL |
| 343 | U8B/HLE- | ARTIFICIAL | QVQLVQSGAEVKKPGASVKVSCKASGYTFTDYHMHWVRQAPGQCLEWMGWIKPISGDANYAQ |
| | BITE I2E | | KFQGRVTMTRDTSISTAYMELSRLRSDDTAVYYCARDYYSSSWTLYYYYGMDVWGQGTTVTV |
| | | | SSGGGGSGGGGSGGGGSQSALTQPPSASGSPGQSVTSYCTGTSSDVGGYNYVSWYQQHPGKA |
| | | | PKLMIYEVSKRPSGVPDRFSGSKSGNTASLTVSGLQAEDEADYYCSSYAGSNNFVFGCGTKV |
| | | | TVLSGGGGSEVQLVESGGGLVQPGGSLKLSCAASGFTFNKYAINWVRQAPGKGLEWVARIRS |
| | | | KYNNYATYYADAVKDRFTISRDDSKNTVYLQMNNLKTEDTAVYYCARAGNFGSSYISYWAYW |
| | | | GQGTLVTVSSGGGGSGGGGSGGGGSQTVVTQEPSLTVSPGGTVTITCGSSTGAVTSGNYPNW |
| | | | VQKKPGQAPRGLIGGTKFLAPGTPARFSGSLSGGKAALTLSGVQPEDEAEYYCVLWYSNRWV |
| | | | FGSGTKLTVLGGGGDKTHTCPPCPAPELLGGPSVFLFPPKPKDTLMISRTPEVTCVVVDVSH |
| | | | EDPEVKFNWYVDGVEVHNAKTKPCEEQYGSTYRCVSVLTVLHQDWLNGKEYKCKVSNKALPA |
| | | | PIEKTISKAKGQPREPQVYTLPPSREEMTKNQVSLTCLVKGFYPSDIAVEWESNGQPENNYK |
| | | | TTPPVLDSDGSFFLYSKLTVDKSRWQQGNVFSCSVMHEALHNHYTQKSLSLSPGKGGGGSGG |
| | | | GGSGGGGSGGGGSGGGGSGGGGSDKTHTCPPCPAPELLGGPSVFLFPPKPKDTLMISRTPEV |
| | | | TCVVVDVSHEDPEVKFNWYVDGVEVHNAKTKPCEEQYGSTYRCVSVLTVLHQDWLNGKEYKC |
| | | | KVSNKALPAPIEKTISKAKGQPREPQVYTLPPSREEMTKNQVSLTCLVKGFYPSDIAVEWES |
| | | | NGQPENNYKTTPPVLDSDGSFFLYSKLTVDKSRWQQGNVFSCSVMHEALHNHYTQKSLSLSP |
| | | | GK |
| 344 | U8B/SCFV | ARTIFICIAL | QVQLVQSGAEVKKPGASVKVSCKASGYTFTDYHMHWVRQAPGQCLEWMGWIKPISGDANYAQ |
| | I2C | | KFQGRVTMTRDTSISTAYMELSRLRSDDTAVYYCARDYYSSSWTLYYYYGMDVWGQGTTVTV |
| | | | SSGGGGSGGGGSGGGGSQSALTQPPSASGSPGQSVTSYCTGTSSDVGGYNYVSWYQQHPGKA |
| | | | PKLMIYEVSKRPSGVPDRFSGSKSGNTASLTVSGLQAEDEADYYCSSYAGSNNFVFGCGTKV |
| | | | TVL |
| 345 | U8B/ | ARTIFICIAL | QVQLVQSGAEVKKPGASVKVSCKASGYTFTDYHMHWVRQAPGQCLEWMGWIKPISGDANYAQ |
| | BISPECIFIC | | KFQGRVTMTRDTSISTAYMELSRLRSDDTAVYYCARDYYSSSWTLYYYYGMDVWGQGTTVTV |
| | MOL I2C | | SSGGGGSGGGGSGGGGSQSALTQPPSASGSPGQSVTSYCTGTSSDVGGYNYVSWYQQHPGKA |
| | | | PKLMIYEVSKRPSGVPDRFSGSKSGNTASLTVSGLQAEDEADYYCSSYAGSNNFVFGCGTKV |
| | | | TVLSGGGGSEVQLVESGGGLVQPGGSLKLSCAASGFTFNKYAMNWVRQAPGKGLEWVARIRS |
| | | | KYNNYATYYADSVKDRFTISRDDSKNTAYLQMNNLKTEDTAVYYCVRHGNFGNSYISYWAYW |
| | | | GQGTLVTVSSGGGGSGGGGSGGGGSQTVVTQEPSLTVSPGGTVTLTCGSSTGAVTSGNYPNW |
| | | | VQQKPGQAPRGLIGGTKFLAPGTPARFSGSLLGGKAALTLSGVQPEDEAEYYCVLWYSNRWV |
| | | | FGGGTKLTVL |
| 346 | U8B/HLE | ARTIFICIAL | QVQLVQSGAEVKKPGASVKVSCKASGYTFTDYHMHWVRQAPGQCLEWMGWIKPISGDANYAQ |
| | BITE I2C | | KFQGRVTMTRDTSISTAYMELSRLRSDDTAVYYCARDYYSSSWTLYYYYGMDVWGQGTTVTV |
| | | | SSGGGGSGGGGSGGGGSQSALTQPPSASGSPGQSVTSYCTGTSSDVGGYNYVSWYQQHPGKA |
| | | | PKLMIYEVSKRPSGVPDRFSGSKSGNTASLTVSGLQAEDEADYYCSSYAGSNNFVFGCGTKV |
| | | | TVLSGGGGSEVQLVESGGGLVQPGGSLKLSCAASGFTFNKYAMNWVRQAPGKGLEWVARIRS |
| | | | KYNNYATYYADSVKDRFTISRDDSKNTAYLQMNNLKTEDTAVYYCVRHGNFGNSYISYWAYW |
| | | | GQGTLVTVSSGGGGSGGGGSGGGGSQTVVTQEPSLTVSPGGTVTLTCGSSTGAVTSGNYPNW |
| | | | VQQKPGQAPRGLIGGTKFLAPGTPARFSGSLLGGKAALTLSGVQPEDEAEYYCVLWYSNRWV |
| | | | FGGGTKLTVLGGGGDKTHTCPPCPAPELLGGPSVFLFPPKPKDTLMISRTPEVTCVVVDVSH |
| | | | EDPEVKFNWYVDGVEVHNAKTKPCEEQYGSTYRCVSVLTVLHQDWLNGKEYKCKVSNKALPA |
| | | | PIEKTISKAKGQPREPQVYTLPPSREEMTKNQVSLTCLVKGFYPSDIAVEWESNGQPENNYK |
| | | | TTPPVLDSDGSFFLYSKLTVDKSRWQQGNVFSCSVMHEALHNHYTQKSLSLSPGKGGGGSGG |
| | | | GGSGGGGSGGGGSGGGGSGGGGSDKTHTCPPCPAPELLGGPSVFLFPPKPKDTLMISRTPEV |
| | | | TCVVVDVSHEDPEVKFNWYVDGVEVHNAKTKPCEEQYGSTYRCVSVLTVLHQDWLNGKEYKC |
| | | | KVSNKALPAPIEKTISKAKGQPREPQVYTLPPSREEMTKNQVSLTCLVKGFYPSDIAVEWES |
| | | | NGQPENNYKTTPPVLDSDGSFFLYSKLTVDKSRWQQGNVFSCSVMHEALHNHYTQKSLSLSP |
| | | | GK |
| 347 | Y8G/VH | ARTIFICIAL | QVQLVQSGAEVKKPGASVKVSCKASGYTFTDYHMHWVRQAPGQCLEWMGWIKPISGDANYAQ |
| | | | KFQGRVTMTRDTSISTAYMELSRLRSDDTAVYYCARDGYSSSWTLYYYYGMDVWGQGTTVTV |
| | | | SS |
| 348 | Y8G/VL | ARTIFICIAL | QSALTQPPSASGSPGQSVTSYCTGTSSDVGGYNYVSWYQQHPGKAPKLMIYEVSKRPSGVPD |
| | | | RFSGSKSGNTASLTVSGLQAEDEADYYCSSYAGSNNFVFGCGTKVTVL |
| 349 | Y8G/CDR-H1 | ARTIFICIAL | DYHMH |
| 350 | Y8G/CDR-H2 | ARTIFICIAL | WIKPISGDANYAQKFQG |
| 351 | Y8G/CDR-H3 | ARTIFICIAL | DGYSSSWTLYYYYGMDV |
| 352 | Y8G/CDR-L1 | ARTIFICIAL | TGTSSDVGGYNYVS |
| 353 | Y8G/CDR-L2 | ARTIFICIAL | EVSKRPS |
| 354 | Y8G/CDR-L3 | ARTIFICIAL | SSYAGSNNFV |
| 355 | Y8G/SCFV | ARTIFICIAL | QVQLVQSGAEVKKPGASVKVSCKASGYTFTDYHMHWVRQAPGQCLEWMGWIKPISGDANYAQ |
| | I2E | | KFQGRVTMTRDTSISTAYMELSRLRSDDTAVYYCARDGYSSSWTLYYYYGMDVWGQGTTVTV |
| | | | SSGGGGSGGGGSGGGGSQSALTQPPSASGSPGQSVTSYCTGTSSDVGGYNYVSWYQQHPGKA |
| | | | PKLMIYEVSKRPSGVPDRFSGSKSGNTASLTVSGLQAEDEADYYCSSYAGSNNFVFGCGTKV |
| | | | TVL |
| 356 | Y8G/ | ARTIFICIAL | QVQLVQSGAEVKKPGASVKVSCKASGYTFTDYHMHWVRQAPGQCLEWMGWIKPISGDANYAQ |
| | BISPECIFIC | | KFQGRVTMTRDTSISTAYMELSRLRSDDTAVYYCARDGYSSSWTLYYYYGMDVWGQGTTVTV |
| | MOL I2E | | SSGGGGSGGGGSGGGGSQSALTQPPSASGSPGQSVTSYCTGTSSDVGGYNYVSWYQQHPGKA |
| | | | PKLMIYEVSKRPSGVPDRFSGSKSGNTASLTVSGLQAEDEADYYCSSYAGSNNFVFGCGTKV |
| | | | TVLSGGGGSEVQLVESGGGLVQPGGSLKLSCAASGFTFNKYAINWVRQAPGKGLEWVARIRS |
| | | | KYNNYATYYADAVKDRFTISRDDSKNTVYLQMNNLKTEDTAVYYCARAGNFGSSYISYWAYW |
| | | | GQGTLVTVSSGGGGSGGGGSGGGGSQTVVTQEPSLTVSPGGTVTITCGSSTGAVTSGNYPNW |
| | | | VQKKPGQAPRGLIGGTKFLAPGTPARFSGSLSGGKAALTLSGVQPEDEAEYYCVLWYSNRWV |
| | | | FGSGTKLTVL |
| 357 | Y8G/HLE- | ARTIFICIAL | QVQLVQSGAEVKKPGASVKVSCKASGYTFTDYHMHWVRQAPGQCLEWMGWIKPISGDANYAQ |
| | BITE I2E | | KFQGRVTMTRDTSISTAYMELSRLRSDDTAVYYCARDGYSSSWTLYYYYGMDVWGQGTTVTV |
| | | | SSGGGGSGGGGSGGGGSQSALTQPPSASGSPGQSVTSYCTGTSSDVGGYNYVSWYQQHPGKA |
| | | | PKLMIYEVSKRPSGVPDRFSGSKSGNTASLTVSGLQAEDEADYYCSSYAGSNNFVFGCGTKV |
| | | | TVLSGGGGSEVQLVESGGGLVQPGGSLKLSCAASGFTFNKYAINWVRQAPGKGLEWVARIRS |
| | | | KYNNYATYYADAVKDRFTISRDDSKNTVYLQMNNLKTEDTAVYYCARAGNFGSSYISYWAYW |
| | | | GQGTLVTVSSGGGGSGGGGSGGGGSQTVVTQEPSLTVSPGGTVTITCGSSTGAVTSGNYPNW |
| | | | VQKKPGQAPRGLIGGTKFLAPGTPARFSGSLSGGKAALTLSGVQPEDEAEYYCVLWYSNRWV |
| | | | FGSGTKLTVLGGGGDKTHTCPPCPAPELLGGPSVFLFPPKPKDTLMISRTPEVTCVVVDVSH |
| | | | EDPEVKFNWYVDGVEVHNAKTKPCEEQYGSTYRCVSVLTVLHQDWLNGKEYKCKVSNKALPA |
| | | | PIEKTISKAKGQPREPQVYTLPPSREEMTKNQVSLTCLVKGFYPSDIAVEWESNGQPENNYK |
| | | | TTPPVLDSDGSFFLYSKLTVDKSRWQQGNVFSCSVMHEALHNHYTQKSLSLSPGKGGGGSGG |
| | | | GGSGGGGSGGGGSGGGGSGGGGSDKTHTCPPCPAPELLGGPSVFLFPPKPKDTLMISRTPEV |
| | | | TCVVVDVSHEDPEVKFNWYVDGVEVHNAKTKPCEEQYGSTYRCVSVLTVLHQDWLNGKEYKC |
| | | | KVSNKALPAPIEKTISKAKGQPREPQVYTLPPSREEMTKNQVSLTCLVKGFYPSDIAVEWES |
| | | | NGQPENNYKTTPPVLDSDGSFFLYSKLTVDKSRWQQGNVFSCSVMHEALHNHYTQKSLSLSP |
| | | | GK |
| 358 | Y8G/SCFV | ARTIFICIAL | QVQLVQSGAEVKKPGASVKVSCKASGYTFTDYHMHWVRQAPGQCLEWMGWIKPISGDANYAQ |
| | I2C | | KFQGRVTMTRDTSISTAYMELSRLRSDDTAVYYCARDGYSSSWTLYYYYGMDVWGQGTTVTV |
| | | | SSGGGGSGGGGSGGGGSQSALTQPPSASGSPGQSVTSYCTGTSSDVGGYNYVSWYQQHPGKA |
| | | | PKLMIYEVSKRPSGVPDRFSGSKSGNTASLTVSGLQAEDEADYYCSSYAGSNNFVFGCGTKV |
| | | | TVL |
| 359 | Y8G/ | ARTIFICIAL | QVQLVQSGAEVKKPGASVKVSCKASGYTFTDYHMHWVRQAPGQCLEWMGWIKPISGDANYAQ |
| | BISPECIFIC | | KFQGRVTMTRDTSISTAYMELSRLRSDDTAVYYCARDGYSSSWTLYYYYGMDVWGQGTTVTV |
| | MOL I2C | | SSGGGGSGGGGSGGGGSQSALTQPPSASGSPGQSVTSYCTGTSSDVGGYNYVSWYQQHPGKA |
| | | | PKLMIYEVSKRPSGVPDRFSGSKSGNTASLTVSGLQAEDEADYYCSSYAGSNNFVFGCGTKV |
| | | | TVLSGGGGSEVQLVESGGGLVQPGGSLKLSCAASGFTFNKYAMNWVRQAPGKGLEWVARIRS |
| | | | KYNNYATYYADSVKDRFTISRDDSKNTAYLQMNNLKTEDTAVYYCVRHGNFGNSYISYWAYW |
| | | | GQGTLVTVSSGGGGSGGGGSGGGGSQTVVTQEPSLTVSPGGTVTLTCGSSTGAVTSGNYPNW |
| | | | VQQKPGQAPRGLIGGTKFLAPGTPARFSGSLLGGKAALTLSGVQPEDEAEYYCVLWYSNRWV |
| | | | FGGGTKLTVL |
| 360 | Y8G/HLE | ARTIFICIAL | QVQLVQSGAEVKKPGASVKVSCKASGYTFTDYHMHWVRQAPGQCLEWMGWIKPISGDANYAQ |
| | BITE I2C | | KFQGRVTMTRDTSISTAYMELSRLRSDDTAVYYCARDGYSSSWTLYYYYGMDVWGQGTTVTV |
| | | | SSGGGGSGGGGSGGGGSQSALTQPPSASGSPGQSVTSYCTGTSSDVGGYNYVSWYQQHPGKA |
| | | | PKLMIYEVSKRPSGVPDRFSGSKSGNTASLTVSGLQAEDEADYYCSSYAGSNNFVFGCGTKV |
| | | | TVLSGGGGSEVQLVESGGGLVQPGGSLKLSCAASGFTFNKYAMNWVRQAPGKGLEWVARIRS |
| | | | KYNNYATYYADSVKDRFTISRDDSKNTAYLQMNNLKTEDTAVYYCVRHGNFGNSYISYWAYW |
| | | | GQGTLVTVSSGGGGSGGGGSGGGGSQTVVTQEPSLTVSPGGTVTLTCGSSTGAVTSGNYPNW |
| | | | VQQKPGQAPRGLIGGTKFLAPGTPARFSGSLLGGKAALTLSGVQPEDEAEYYCVLWYSNRWV |
| | | | FGGGTKLTVLGGGGDKTHTCPPCPAPELLGGPSVFLFPPKPKDTLMISRTPEVTCVVVDVSH |
| | | | EDPEVKFNWYVDGVEVHNAKTKPCEEQYGSTYRCVSVLTVLHQDWLNGKEYKCKVSNKALPA |
| | | | PIEKTISKAKGQPREPQVYTLPPSREEMTKNQVSLTCLVKGFYPSDIAVEWESNGQPENNYK |
| | | | TTPPVLDSDGSFFLYSKLTVDKSRWQQGNVFSCSVMHEALHNHYTQKSLSLSPGKGGGGSGG |
| | | | GGSGGGGSGGGGSGGGGSGGGGSDKTHTCPPCPAPELLGGPSVFLFPPKPKDTLMISRTPEV |
| | | | TCVVVDVSHEDPEVKFNWYVDGVEVHNAKTKPCEEQYGSTYRCVSVLTVLHQDWLNGKEYKC |
| | | | KVSNKALPAPIEKTISKAKGQPREPQVYTLPPSREEMTKNQVSLTCLVKGFYPSDIAVEWES |
| | | | NGQPENNYKTTPPVLDSDGSFFLYSKLTVDKSRWQQGNVFSCSVMHEALHNHYTQKSLSLSP |
| | | | GK |
| 361 | G8B/VH | ARTIFICIAL | QVQLVQSGAEVKKPGASVKVSCKASGYTFTDYHMHWVRQAPGQCLEWMGWIKPISGDANYAQ |
| | | | KFQGRVTMTRDTSISTAYMELSRLRSDDTAVYYCARDYYSSSWTLYYYYGMDVWGQGTTVTV |
| | | | SS |
| 362 | G8B/VL | ARTIFICIAL | QSALTQPPSASGSPGQSVTIYCTGTSSDVGGYNYVSWYQQHPGKAPKLMIYEVSKRPSGVPD |
| | | | RFSGSKSGNTASLTVSGLQAEDEADYYCSSYAGSNNFVFGCGTKVTVL |
| 363 | G8B/CDR-H1 | ARTIFICIAL | DYHMH |
| 364 | G8B/CDR-H2 | ARTIFICIAL | WIKPISGDANYAQKFQG |
| 365 | G8B/CDR-H3 | ARTIFICIAL | DYYSSSWTLYYYYGMDV |
| 366 | G8B/CDR-L1 | ARTIFICIAL | TGTSSDVGGYNYVS |
| 367 | G8B/CDR-L2 | ARTIFICIAL | EVSKRPS |
| 368 | G8B/CDR-L3 | ARTIFICIAL | SSYAGSNNFV |
| 369 | G8B/SCFV | ARTIFICIAL | QVQLVQSGAEVKKPGASVKVSCKASGYTFTDYHMHWVRQAPGQCLEWMGWIKPISGDANYAQ |
| | I2E | | KFQGRVTMTRDTSISTAYMELSRLRSDDTAVYYCARDYYSSSWTLYYYYGMDVWGQGTTVTV |
| | | | SSGGGGSGGGGSGGGGSQSALTQPPSASGSPGQSVTIYCTGTSSDVGGYNYVSWYQQHPGKA |
| | | | PKLMIYEVSKRPSGVPDRFSGSKSGNTASLTVSGLQAEDEADYYCSSYAGSNNFVFGCGTKV |
| | | | TVL |
| 370 | G8B/ | ARTIFICIAL | QVQLVQSGAEVKKPGASVKVSCKASGYTFTDYHMHWVRQAPGQCLEWMGWIKPISGDANYAQ |
| | BISPECIFIC | | KFQGRVTMTRDTSISTAYMELSRLRSDDTAVYYCARDYYSSSWTLYYYYGMDVWGQGTTVTV |
| | MOL I2E | | SSGGGGSGGGGSGGGGSQSALTQPPSASGSPGQSVTIYCTGTSSDVGGYNYVSWYQQHPGKA |
| | | | PKLMIYEVSKRPSGVPDRFSGSKSGNTASLTVSGLQAEDEADYYCSSYAGSNNFVFGCGTKV |
| | | | TVLSGGGGSEVQLVESGGGLVQPGGSLKLSCAASGFTFNKYAINWVRQAPGKGLEWVARIRS |
| | | | KYNNYATYYADAVKDRFTISRDDSKNTVYLQMNNLKTEDTAVYYCARAGNFGSSYISYWAYW |
| | | | GQGTLVTVSSGGGGSGGGGSGGGGSQTVVTQEPSLTVSPGGTVTITCGSSTGAVTSGNYPNW |
| | | | VQKKPGQAPRGLIGGTKFLAPGTPARFSGSLSGGKAALTLSGVQPEDEAEYYCVLWYSNRWV |
| | | | FGSGTKLTVL |
| 371 | G8B/HLE- | ARTIFICIAL | QVQLVQSGAEVKKPGASVKVSCKASGYTFTDYHMHWVRQAPGQCLEWMGWIKPISGDANYAQ |
| | BITE I2E | | KFQGRVTMTRDTSISTAYMELSRLRSDDTAVYYCARDYYSSSWTLYYYYGMDVWGQGTTVTV |
| | | | SSGGGGSGGGGSGGGGSQSALTQPPSASGSPGQSVTIYCTGTSSDVGGYNYVSWYQQHPGKA |
| | | | PKLMIYEVSKRPSGVPDRFSGSKSGNTASLTVSGLQAEDEADYYCSSYAGSNNFVFGCGTKV |
| | | | TVLSGGGGSEVQLVESGGGLVQPGGSLKLSCAASGFTFNKYAINWVRQAPGKGLEWVARIRS |
| | | | KYNNYATYYADAVKDRFTISRDDSKNTVYLQMNNLKTEDTAVYYCARAGNFGSSYISYWAYW |
| | | | GQGTLVTVSSGGGGSGGGGSGGGGSQTVVTQEPSLTVSPGGTVTITCGSSTGAVTSGNYPNW |
| | | | VQKKPGQAPRGLIGGTKFLAPGTPARFSGSLSGGKAALTLSGVQPEDEAEYYCVLWYSNRWV |
| | | | FGSGTKLTVLGGGGDKTHTCPPCPAPELLGGPSVFLFPPKPKDTLMISRTPEVTCVVVDVSH |
| | | | EDPEVKFNWYVDGVEVHNAKTKPCEEQYGSTYRCVSVLTVLHQDWLNGKEYKCKVSNKALPA |
| | | | PIEKTISKAKGQPREPQVYTLPPSREEMTKNQVSLTCLVKGFYPSDIAVEWESNGQPENNYK |
| | | | TTPPVLDSDGSFFLYSKLTVDKSRWQQGNVFSCSVMHEALHNHYTQKSLSLSPGKGGGGSGG |
| | | | GGSGGGGSGGGGSGGGGSGGGGSDKTHTCPPCPAPELLGGPSVFLFPPKPKDTLMISRTPEV |
| | | | TCVVVDVSHEDPEVKFNWYVDGVEVHNAKTKPCEEQYGSTYRCVSVLTVLHQDWLNGKEYKC |
| | | | KVSNKALPAPIEKTISKAKGQPREPQVYTLPPSREEMTKNQVSLTCLVKGFYPSDIAVEWES |
| | | | NGQPENNYKTTPPVLDSDGSFFLYSKLTVDKSRWQQGNVFSCSVMHEALHNHYTQKSLSLSP |
| | | | GK |
| 372 | G8B/SCFV | ARTIFICIAL | QVQLVQSGAEVKKPGASVKVSCKASGYTFTDYHMHWVRQAPGQCLEWMGWIKPISGDANYAQ |
| | I2C | | KFQGRVTMTRDTSISTAYMELSRLRSDDTAVYYCARDYYSSSWTLYYYYGMDVWGQGTTVTV |
| | | | SSGGGGSGGGGSGGGGSQSALTQPPSASGSPGQSVTIYCTGTSSDVGGYNYVSWYQQHPGKA |
| | | | PKLMIYEVSKRPSGVPDRFSGSKSGNTASLTVSGLQAEDEADYYCSSYAGSNNFVFGCGTKV |
| | | | TVL |
| 373 | G8B/ | ARTIFICIAL | QVQLVQSGAEVKKPGASVKVSCKASGYTFTDYHMHWVRQAPGQCLEWMGWIKPISGDANYAQ |
| | BISPECIFIC | | KFQGRVTMTRDTSISTAYMELSRLRSDDTAVYYCARDYYSSSWTLYYYYGMDVWGQGTTVTV |
| | MOL I2C | | SSGGGGSGGGGSGGGGSQSALTQPPSASGSPGQSVTIYCTGTSSDVGGYNYVSWYQQHPGKA |
| | | | PKLMIYEVSKRPSGVPDRFSGSKSGNTASLTVSGLQAEDEADYYCSSYAGSNNFVFGCGTKV |
| | | | TVLSGGGGSEVQLVESGGGLVQPGGSLKLSCAASGFTFNKYAMNWVRQAPGKGLEWVARIRS |
| | | | KYNNYATYYADSVKDRFTISRDDSKNTAYLQMNNLKTEDTAVYYCVRHGNFGNSYISYWAYW |
| | | | GQGTLVTVSSGGGGSGGGGSGGGGSQTVVTQEPSLTVSPGGTVTLTCGSSTGAVTSGNYPNW |
| | | | VQQKPGQAPRGLIGGTKFLAPGTPARFSGSLLGGKAALTLSGVQPEDEAEYYCVLWYSNRWV |
| | | | FGGGTKLTVL |
| 374 | G8B/HLE | ARTIFICIAL | QVQLVQSGAEVKKPGASVKVSCKASGYTFTDYHMHWVRQAPGQCLEWMGWIKPISGDANYAQ |
| | BITE I2C | | KFQGRVTMTRDTSISTAYMELSRLRSDDTAVYYCARDYYSSSWTLYYYYGMDVWGQGTTVTV |
| | | | SSGGGGSGGGGSGGGGSQSALTQPPSASGSPGQSVTIYCTGTSSDVGGYNYVSWYQQHPGKA |
| | | | PKLMIYEVSKRPSGVPDRFSGSKSGNTASLTVSGLQAEDEADYYCSSYAGSNNFVFGCGTKV |
| | | | TVLSGGGGSEVQLVESGGGLVQPGGSLKLSCAASGFTFNKYAMNWVRQAPGKGLEWVARIRS |
| | | | KYNNYATYYADSVKDRFTISRDDSKNTAYLQMNNLKTEDTAVYYCVRHGNFGNSYISYWAYW |
| | | | GQGTLVTVSSGGGGSGGGGSGGGGSQTVVTQEPSLTVSPGGTVTLTCGSSTGAVTSGNYPNW |
| | | | VQQKPGQAPRGLIGGTKFLAPGTPARFSGSLLGGKAALTLSGVQPEDEAEYYCVLWYSNRWV |
| | | | FGGGTKLTVLGGGGDKTHTCPPCPAPELLGGPSVFLFPPKPKDTLMISRTPEVTCVVVDVSH |
| | | | EDPEVKFNWYVDGVEVHNAKTKPCEEQYGSTYRCVSVLTVLHQDWLNGKEYKCKVSNKALPA |
| | | | PIEKTISKAKGQPREPQVYTLPPSREEMTKNQVSLTCLVKGFYPSDIAVEWESNGQPENNYK |
| | | | TTPPVLDSDGSFFLYSKLTVDKSRWQQGNVFSCSVMHEALHNHYTQKSLSLSPGKGGGGSGG |
| | | | GGSGGGGSGGGGSGGGGSGGGGSDKTHTCPPCPAPELLGGPSVFLFPPKPKDTLMISRTPEV |
| | | | TCVVVDVSHEDPEVKFNWYVDGVEVHNAKTKPCEEQYGSTYRCVSVLTVLHQDWLNGKEYKC |
| | | | KVSNKALPAPIEKTISKAKGQPREPQVYTLPPSREEMTKNQVSLTCLVKGFYPSDIAVEWES |
| | | | NGQPENNYKTTPPVLDSDGSFFLYSKLTVDKSRWQQGNVFSCSVMHEALHNHYTQKSLSLSP |
| | | | GK |
| 375 | W9B/VH | ARTIFICIAL | QVQLVQSGAEVKKPGASVKVSCKASGYTFTDYHMHWVRQAPGQCLEWMGWIKPISGDTNYAQ |
| | | | KFQGRVTMTRDTSISTAYMELSRLRSDDTAVYYCARDGYSSSWTLYYYYGMDVWGQGTTVTV |
| | | | SS |
| 376 | W9B/VL | ARTIFICIAL | QSALTQPPSASGSPGQSVTSYCTGTSSDVGGYNYVSWYQQHPGKAPKLMIYEVSKRPSGVPD |
| | | | RFSGSKSGNTASLTVSGLQAEDEADYYCSSYAGSNNFVFGCGTKVTVL |
| 377 | W9B/CDR-H1 | ARTIFICIAL | DYHMH |
| 378 | W9B/CDR-H2 | ARTIFICIAL | WIKPISGDTNYAQKFQG |
| 379 | W9B/CDR-H3 | ARTIFICIAL | DGYSSSWTLYYYYGMDV |
| 380 | W9B/CDR-L1 | ARTIFICIAL | TGTSSDVGGYNYVS |
| 381 | W9B/CDR-L2 | ARTIFICIAL | EVSKRPS |
| 382 | W9B/CDR-L3 | ARTIFICIAL | SSYAGSNNFV |
| 383 | W9B/SCFV | ARTIFICIAL | QVQLVQSGAEVKKPGASVKVSCKASGYTFTDYHMHWVRQAPGQCLEWMGWIKPISGDTNYAQ |
| | I2E | | KFQGRVTMTRDTSISTAYMELSRLRSDDTAVYYCARDGYSSSWTLYYYYGMDVWGQGTTVTV |
| | | | SSGGGGSGGGGSGGGGSQSALTQPPSASGSPGQSVTSYCTGTSSDVGGYNYVSWYQQHPGKA |
| | | | PKLMIYEVSKRPSGVPDRFSGSKSGNTASLTVSGLQAEDEADYYCSSYAGSNNFVFGCGTKV |
| | | | TVL |
| 384 | W9B/ | ARTIFICIAL | QVQLVQSGAEVKKPGASVKVSCKASGYTFTDYHMHWVRQAPGQCLEWMGWIKPISGDTNYAQ |
| | BISPECIFIC | | KFQGRVTMTRDTSISTAYMELSRLRSDDTAVYYCARDGYSSSWTLYYYYGMDVWGQGTTVTV |
| | MOL I2E | | SSGGGGSGGGGSGGGGSQSALTQPPSASGSPGQSVTSYCTGTSSDVGGYNYVSWYQQHPGKA |
| | | | PKLMIYEVSKRPSGVPDRFSGSKSGNTASLTVSGLQAEDEADYYCSSYAGSNNFVFGCGTKV |
| | | | TVLSGGGGSEVQLVESGGGLVQPGGSLKLSCAASGFTFNKYAINWVRQAPGKGLEWVARIRS |
| | | | KYNNYATYYADAVKDRFTISRDDSKNTVYLQMNNLKTEDTAVYYCARAGNFGSSYISYWAYW |
| | | | GQGTLVTVSSGGGGSGGGGSGGGGSQTVVTQEPSLTVSPGGTVTITCGSSTGAVTSGNYPNW |
| | | | VQKKPGQAPRGLIGGTKFLAPGTPARFSGSLSGGKAALTLSGVQPEDEAEYYCVLWYSNRWV |
| | | | FGSGTKLTVL |
| 385 | W9B/HLE- | ARTIFICIAL | QVQLVQSGAEVKKPGASVKVSCKASGYTFTDYHMHWVRQAPGQCLEWMGWIKPISGDTNYAQ |
| | BITE I2E | | KFQGRVTMTRDTSISTAYMELSRLRSDDTAVYYCARDGYSSSWTLYYYYGMDVWGQGTTVTV |
| | | | SSGGGGSGGGGSGGGGSQSALTQPPSASGSPGQSVTSYCTGTSSDVGGYNYVSWYQQHPGKA |
| | | | PKLMIYEVSKRPSGVPDRFSGSKSGNTASLTVSGLQAEDEADYYCSSYAGSNNFVFGCGTKV |
| | | | TVLSGGGGSEVQLVESGGGLVQPGGSLKLSCAASGFTFNKYAINWVRQAPGKGLEWVARIRS |
| | | | KYNNYATYYADAVKDRFTISRDDSKNTVYLQMNNLKTEDTAVYYCARAGNFGSSYISYWAYW |
| | | | GQGTLVTVSSGGGGSGGGGSGGGGSQTVVTQEPSLTVSPGGTVTITCGSSTGAVTSGNYPNW |
| | | | VQKKPGQAPRGLIGGTKFLAPGTPARFSGSLSGGKAALTLSGVQPEDEAEYYCVLWYSNRWV |
| | | | FGSGTKLTVLGGGGDKTHTCPPCPAPELLGGPSVFLFPPKPKDTLMISRTPEVTCVVVDVSH |
| | | | EDPEVKFNWYVDGVEVHNAKTKPCEEQYGSTYRCVSVLTVLHQDWLNGKEYKCKVSNKALPA |
| | | | PIEKTISKAKGQPREPQVYTLPPSREEMTKNQVSLTCLVKGFYPSDIAVEWESNGQPENNYK |
| | | | TTPPVLDSDGSFFLYSKLTVDKSRWQQGNVFSCSVMHEALHNHYTQKSLSLSPGKGGGGSGG |
| | | | GGSGGGGSGGGGSGGGGSGGGGSDKTHTCPPCPAPELLGGPSVFLFPPKPKDTLMISRTPEV |
| | | | TCVVVDVSHEDPEVKFNWYVDGVEVHNAKTKPCEEQYGSTYRCVSVLTVLHQDWLNGKEYKC |
| | | | KVSNKALPAPIEKTISKAKGQPREPQVYTLPPSREEMTKNQVSLTCLVKGFYPSDIAVEWES |
| | | | NGQPENNYKTTPPVLDSDGSFFLYSKLTVDKSRWQQGNVFSCSVMHEALHNHYTQKSLSLSP |
| | | | GK |
| 386 | W9B/SCFV | ARTIFICIAL | QVQLVQSGAEVKKPGASVKVSCKASGYTFTDYHMHWVRQAPGQCLEWMGWIKPISGDTNYAQ |
| | I2C | | KFQGRVTMTRDT |
| | | | SISTAYMELSRLRSDDTAVYYCARDGYSSSWTLYYYYGMDVWGQGTTVTVSSGGGGSGGGGS |
| | | | GGGGSQSALTQPPSASGSPGQSVTSYCTGTSSDVGGYNYVSWYQQHPGKAPKLMIYEVSKRP |
| | | | SGVPDRFSGSKSGNTASLTVSGLQAEDEADYYCSSYAGSNNFVFGCGTKVTVL |
| 387 | W9B/ | ARTIFICIAL | QVQLVQSGAEVKKPGASVKVSCKASGYTFTDYHMHWVRQAPGQCLEWMGWIKPISGDTNYAQ |
| | BISPECIFIC | | KFQGRVTMTRDTSISTAYMELSRLRSDDTAVYYCARDGYSSSWTLYYYYGMDVWGQGTTVTV |
| | MOL I2C | | SSGGGGSGGGGSGGGGSQSALTQPPSASGSPGQSVTSYCTGTSSDVGGYNYVSWYQQHPGKA |
| | | | PKLMIYEVSKRPSGVPDRFSGSKSGNTASLTVSGLQAEDEADYYCSSYAGSNNFVFGCGTKV |
| | | | TVLSGGGGSEVQLVESGGGLVQPGGSLKLSCAASGFTFNKYAMNWVRQAPGKGLEWVARIRS |
| | | | KYNNYATYYADSVKDRFTISRDDSKNTAYLQMNNLKTEDTAVYYCVRHGNFGNSYISYWAYW |
| | | | GQGTLVTVSSGGGGSGGGGSGGGGSQTVVTQEPSLTVSPGGTVTLTCGSSTGAVTSGNYPNW |
| | | | VQQKPGQAPRGLIGGTKFLAPGTPARFSGSLLGGKAALTLSGVQPEDEAEYYCVLWYSNRWV |
| | | | FGGGTKLTVL |
| 388 | W9B/HLE | ARTIFICIAL | QVQLVQSGAEVKKPGASVKVSCKASGYTFTDYHMHWVRQAPGQCLEWMGWIKPISGDTNYAQ |
| | BITE I2C | | KFQGRVTMTRDTSISTAYMELSRLRSDDTAVYYCARDGYSSSWTLYYYYGMDVWGQGTTVTV |
| | | | SSGGGGSGGGGSGGGGSQSALTQPPSASGSPGQSVTSYCTGTSSDVGGYNYVSWYQQHPGKA |
| | | | PKLMIYEVSKRPSGVPDRFSGSKSGNTASLTVSGLQAEDEADYYCSSYAGSNNFVFGCGTKV |
| | | | TVLSGGGGSEVQLVESGGGLVQPGGSLKLSCAASGFTFNKYAMNWVRQAPGKGLEWVARIRS |
| | | | KYNNYATYYADSVKDRFTISRDDSKNTAYLQMNNLKTEDTAVYYCVRHGNFGNSYISYWAYW |
| | | | GQGTLVTVSSGGGGSGGGGSGGGGSQTVVTQEPSLTVSPGGTVTLTCGSSTGAVTSGNYPNW |
| | | | VQQKPGQAPRGLIGGTKFLAPGTPARFSGSLLGGKAALTLSGVQPEDEAEYYCVLWYSNRWV |
| | | | FGGGTKLTVLGGGGDKTHTCPPCPAPELLGGPSVFLFPPKPKDTLMISRTPEVTCVVVDVSH |
| | | | EDPEVKFNWYVDGVEVHNAKTKPCEEQYGSTYRCVSVLTVLHQDWLNGKEYKCKVSNKALPA |
| | | | PIEKTISKAKGQPREPQVYTLPPSREEMTKNQVSLTCLVKGFYPSDIAVEWESNGQPENNYK |
| | | | TTPPVLDSDGSFFLYSKLTVDKSRWQQGNVFSCSVMHEALHNHYTQKSLSLSPGKGGGGSGG |
| | | | GGSGGGGSGGGGSGGGGSGGGGSDKTHTCPPCPAPELLGGPSVFLFPPKPKDTLMISRTPEV |
| | | | TCVVVDVSHEDPEVKFNWYVDGVEVHNAKTKPCEEQYGSTYRCVSVLTVLHQDWLNGKEYKC |
| | | | KVSNKALPAPIEKTISKAKGQPREPQVYTLPPSREEMTKNQVSLTCLVKGFYPSDIAVEWES |
| | | | NGQPENNYKTTPPVLDSDGSFFLYSKLTVDKSRWQQGNVFSCSVMHEALHNHYTQKSLSLSP |
| | | | GK |
| 389 | A9G/VH | ARTIFICIAL | QVQLVQSGAEVKKPGASVKVSCKASGYTFTDYHMHWVRQAPGQCLEWMGWIKPISGDANYAQ |
| | | | KFQGRVTMTRDTSISTAYMELSRLRSDDTAVYYCARDYYSSSWTLYYYYGMDVWGQGTTVTV |
| | | | SS |
| 390 | A9G/VL | ARTIFICIAL | QSALTQPPSASGSPGQSVTISCTGTSSDVGGYNYVSWYQQHPGKAPKLMIYEVSKRPSGVPD |
| | | | RFSGSKSGNTASLTVSGLQAEDEADYYCSSYAGSNNFVFGCGTKVTVL |
| 391 | A9G/CDR-H1 | ARTIFICIAL | DYHMH |
| 392 | A9G/CDR-H2 | ARTIFICIAL | WIKPISGDANYAQKFQG |
| 393 | A9G/CDR-H3 | ARTIFICIAL | DYYSSSWTLYYYYGMDV |
| 394 | A9G/CDR-L1 | ARTIFICIAL | TGTSSDVGGYNYVS |
| 395 | A9G/CDR-L2 | ARTIFICIAL | EVSKRPS |
| 396 | A9G/CDR-L3 | ARTIFICIAL | SSYAGSNNFV |
| 397 | A9G/SCFV | ARTIFICIAL | QVQLVQSGAEVKKPGASVKVSCKASGYTFTDYHMHWVRQAPGQCLEWMGWIKPISGDANYAQ |
| | I2E | | KFQGRVTMTRDTSISTAYMELSRLRSDDTAVYYCARDYYSSSWTLYYYYGMDVWGQGTTVTV |
| | | | SSGGGGSGGGGSGGGGSQSALTQPPSASGSPGQSVTISCTGTSSDVGGYNYVSWYQQHPGKA |
| | | | PKLMIYEVSKRPSGVPDRFSGSKSGNTASLTVSGLQAEDEADYYCSSYAGSNNFVFGCGTKV |
| | | | TVL |
| 398 | A9G/ | ARTIFICIAL | QVQLVQSGAEVKKPGASVKVSCKASGYTFTDYHMHWVRQAPGQCLEWMGWIKPISGDANYAQ |
| | BISPECIFIC | | KFQGRVTMTRDTSISTAYMELSRLRSDDTAVYYCARDYYSSSWTLYYYYGMDVWGQGTTVTV |
| | MOL I2E | | SSGGGGSGGGGSGGGGSQSALTQPPSASGSPGQSVTISCTGTSSDVGGYNYVSWYQQHPGKA |
| | | | PKLMIYEVSKRPSGVPDRFSGSKSGNTASLTVSGLQAEDEADYYCSSYAGSNNFVFGCGTKV |
| | | | TVLSGGGGSEVQLVESGGGLVQPGGSLKLSCAASGFTFNKYAINWVRQAPGKGLEWVARIRS |
| | | | KYNNYATYYADAVKDRFTISRDDSKNTVYLQMNNLKTEDTAVYYCARAGNFGSSYISYWAYW |
| | | | GQGTLVTVSSGGGGSGGGGSGGGGSQTVVTQEPSLTVSPGGTVTITCGSSTGAVTSGNYPNW |
| | | | VQKKPGQAPRGLIGGTKFLAPGTPARFSGSLSGGKAALTLSGVQPEDEAEYYCVLWYSNRWV |
| | | | FGSGTKLTVL |
| 399 | A9G/HLE- | ARTIFICIAL | QVQLVQSGAEVKKPGASVKVSCKASGYTFTDYHMHWVRQAPGQCLEWMGWIKPISGDANYAQ |
| | BITE I2E | | KFQGRVTMTRDTSISTAYMELSRLRSDDTAVYYCARDYYSSSWTLYYYYGMDVWGQGTTVTV |
| | | | SSGGGGSGGGGSGGGGSQSALTQPPSASGSPGQSVTISCTGTSSDVGGYNYVSWYQQHPGKA |
| | | | PKLMIYEVSKRPSGVPDRFSGSKSGNTASLTVSGLQAEDEADYYCSSYAGSNNFVFGCGTKV |
| | | | TVLSGGGGSEVQLVESGGGLVQPGGSLKLSCAASGFTFNKYAINWVRQAPGKGLEWVARIRS |
| | | | KYNNYATYYADAVKDRFTISRDDSKNTVYLQMNNLKTEDTAVYYCARAGNFGSSYISYWAYW |
| | | | GQGTLVTVSSGGGGSGGGGSGGGGSQTVVTQEPSLTVSPGGTVTITCGSSTGAVTSGNYPNW |
| | | | VQKKPGQAPRGLIGGTKFLAPGTPARFSGSLSGGKAALTLSGVQPEDEAEYYCVLWYSNRWV |
| | | | FGSGTKLTVLGGGGDKTHTCPPCPAPELLGGPSVFLFPPKPKDTLMISRTPEVTCVVVDVSH |
| | | | EDPEVKFNWYVDGVEVHNAKTKPCEEQYGSTYRCVSVLTVLHQDWLNGKEYKCKVSNKALPA |
| | | | PIEKTISKAKGQPREPQVYTLPPSREEMTKNQVSLTCLVKGFYPSDIAVEWESNGQPENNYK |
| | | | TTPPVLDSDGSFFLYSKLTVDKSRWQQGNVFSCSVMHEALHNHYTQKSLSLSPGKGGGGSGG |
| | | | GGSGGGGSGGGGSGGGGSGGGGSDKTHTCPPCPAPELLGGPSVFLFPPKPKDTLMISRTPEV |
| | | | TCVVVDVSHEDPEVKFNWYVDGVEVHNAKTKPCEEQYGSTYRCVSVLTVLHQDWLNGKEYKC |
| | | | KVSNKALPAPIEKTISKAKGQPREPQVYTLPPSREEMTKNQVSLTCLVKGFYPSDIAVEWES |
| | | | NGQPENNYKTTPPVLDSDGSFFLYSKLTVDKSRWQQGNVFSCSVMHEALHNHYTQKSLSLSP |
| | | | GK |
| 400 | A9G/SCFV | ARTIFICIAL | QVQLVQSGAEVKKPGASVKVSCKASGYTFTDYHMHWVRQAPGQCLEWMGWIKPISGDANYAQ |
| | I2C | | KFQGRVTMTRDTSISTAYMELSRLRSDDTAVYYCARDYYSSSWTLYYYYGMDVWGQGTTVTV |
| | | | SSGGGGSGGGGSGGGGSQSALTQPPSASGSPGQSVTISCTGTSSDVGGYNYVSWYQQHPGKA |
| | | | PKLMIYEVSKRPSGVPDRFSGSKSGNTASLTVSGLQAEDEADYYCSSYAGSNNFVFGCGTKV |
| | | | TVL |
| 401 | A9G/ | ARTIFICIAL | QVQLVQSGAEVKKPGASVKVSCKASGYTFTDYHMHWVRQAPGQCLEWMGWIKPISGDANYAQ |
| | BISPECIFIC | | KFQGRVTMTRDTSISTAYMELSRLRSDDTAVYYCARDYYSSSWTLYYYYGMDVWGQGTTVTV |
| | MOL I2C | | SSGGGGSGGGGSGGGGSQSALTQPPSASGSPGQSVTISCTGTSSDVGGYNYVSWYQQHPGKA |
| | | | PKLMIYEVSKRPSGVPDRFSGSKSGNTASLTVSGLQAEDEADYYCSSYAGSNNFVFGCGTKV |
| | | | TVLSGGGGSEVQLVESGGGLVQPGGSLKLSCAASGFTFNKYAMNWVRQAPGKGLEWVARIRS |
| | | | KYNNYATYYADSVKDRFTISRDDSKNTAYLQMNNLKTEDTAVYYCVRHGNFGNSYISYWAYW |
| | | | GQGTLVTVSSGGGGSGGGGSGGGGSQTVVTQEPSLTVSPGGTVTLTCGSSTGAVTSGNYPNW |
| | | | VQQKPGQAPRGLIGGTKFLAPGTPARFSGSLLGGKAALTLSGVQPEDEAEYYCVLWYSNRWV |
| | | | FGGGTKLTVL |
| 402 | A9G/HLE | ARTIFICIAL | QVQLVQSGAEVKKPGASVKVSCKASGYTFTDYHMHWVRQAPGQCLEWMGWIKPISGDANYAQ |
| | BITE I2C | | KFQGRVTMTRDTSISTAYMELSRLRSDDTAVYYCARDYYSSSWTLYYYYGMDVWGQGTTVTV |
| | | | SSGGGGSGGGGSGGGGSQSALTQPPSASGSPGQSVTISCTGTSSDVGGYNYVSWYQQHPGKA |
| | | | PKLMIYEVSKRPSGVPDRFSGSKSGNTASLTVSGLQAEDEADYYCSSYAGSNNFVFGCGTKV |
| | | | TVLSGGGGSEVQLVESGGGLVQPGGSLKLSCAASGFTFNKYAMNWVRQAPGKGLEWVARIRS |
| | | | KYNNYATYYADSVKDRFTISRDDSKNTAYLQMNNLKTEDTAVYYCVRHGNFGNSYISYWAYW |
| | | | GQGTLVTVSSGGGGSGGGGSGGGGSQTVVTQEPSLTVSPGGTVTLTCGSSTGAVTSGNYPNW |
| | | | VQQKPGQAPRGLIGGTKFLAPGTPARFSGSLLGGKAALTLSGVQPEDEAEYYCVLWYSNRWV |
| | | | FGGGTKLTVLGGGGDKTHTCPPCPAPELLGGPSVFLFPPKPKDTLMISRTPEVTCVVVDVSH |
| | | | EDPEVKFNWYVDGVEVHNAKTKPCEEQYGSTYRCVSVLTVLHQDWLNGKEYKCKVSNKALPA |
| | | | PIEKTISKAKGQPREPQVYTLPPSREEMTKNQVSLTCLVKGFYPSDIAVEWESNGQPENNYK |
| | | | TTPPVLDSDGSFFLYSKLTVDKSRWQQGNVFSCSVMHEALHNHYTQKSLSLSPGKGGGGSGG |
| | | | GGSGGGGSGGGGSGGGGSGGGGSDKTHTCPPCPAPELLGGPSVFLFPPKPKDTLMISRTPEV |
| | | | TCVVVDVSHEDPEVKFNWYVDGVEVHNAKTKPCEEQYGSTYRCVSVLTVLHQDWLNGKEYKC |
| | | | KVSNKALPAPIEKTISKAKGQPREPQVYTLPPSREEMTKNQVSLTCLVKGFYPSDIAVEWES |
| | | | NGQPENNYKTTPPVLDSDGSFFLYSKLTVDKSRWQQGNVFSCSVMHEALHNHYTQKSLSLSP |
| | | | GK |
| 403 | D3F/VH | ARTIFICIAL | QVQLVQSGAEVKKPGASVKVSCKASGYTFTDYHMHWVRQAPGQCLEWMGWIKPISGDTNYAQ |
| | | | KFQGRVTMTRDTSISTAYMELSRLRSDDTAVYYCARDYYSSSWTLYYYYGMDVWGQGTTVTV |
| | | | SS |
| 404 | D3F/VL | ARTIFICIAL | QSALTQPPSASGSPGQSVTSYCTGTSSDVGGYNYVSWYQQHPGKAPKLMIYEVSKRPSGVPD |
| | | | RFSGSKSGNTASLTVSGLQAEDEADYYCSSYAGSNNFVFGCGTKVTVL |
| 405 | D3F/CDR-H1 | ARTIFICIAL | DYHMH |
| 406 | D3F/CDR-H2 | ARTIFICIAL | WIKPISGDTNYAQKFQG |
| 407 | D3F/CDR-H3 | ARTIFICIAL | DYYSSSWTLYYYYGMDV |
| 408 | D3F CDR-L1 | ARTIFICIAL | TGTSSDVGGYNYVS |
| 409 | D3F/CDR-L2 | ARTIFICIAL | EVSKRPS |
| 410 | D3F/CDR-L3 | ARTIFICIAL | SSYAGSNNFV |
| 411 | D3F/SCFV | ARTIFICIAL | QVQLVQSGAEVKKPGASVKVSCKASGYTFTDYHMHWVRQAPGQCLEWMGWIKPISGDTNYAQ |
| | I2E | | KFQGRVTMTRDTSISTAYMELSRLRSDDTAVYYCARDYYSSSWTLYYYYGMDVWGQGTTVTV |
| | | | SSGGGGSGGGGSGGGGSQSALTQPPSASGSPGQSVTSYCTGTSSDVGGYNYVSWYQQHPGKA |
| | | | PKLMIYEVSKRPSGVPDRFSGSKSGNTASLTVSGLQAEDEADYYCSSYAGSNNFVFGCGTKV |
| | | | TVL |
| 412 | D3F/ | ARTIFICIAL | QVQLVQSGAEVKKPGASVKVSCKASGYTFTDYHMHWVRQAPGQCLEWMGWIKPISGDTNYAQ |
| | BISPECIFIC | | KFQGRVTMTRDTSISTAYMELSRLRSDDTAVYYCARDYYSSSWTLYYYYGMDVWGQGTTVTV |
| | MOL I2E | | SSGGGGSGGGGSGGGGSQSALTQPPSASGSPGQSVTSYCTGTSSDVGGYNYVSWYQQHPGKA |
| | | | PKLMIYEVSKRPSGVPDRFSGSKSGNTASLTVSGLQAEDEADYYCSSYAGSNNFVFGCGTKV |
| | | | TVLSGGGGSEVQLVESGGGLVQPGGSLKLSCAASGFTFNKYAINWVRQAPGKGLEWVARIRS |
| | | | KYNNYATYYADAVKDRFTISRDDSKNTVYLQMNNLKTEDTAVYYCARAGNFGSSYISYWAYW |
| | | | GQGTLVTVSSGGGGSGGGGSGGGGSQTVVTQEPSLTVSPGGTVTITCGSSTGAVTSGNYPNW |
| | | | VQKKPGQAPRGLIGGTKFLAPGTPARFSGSLSGGKAALTLSGVQPEDEAEYYCVLWYSNRWV |
| | | | FGSGTKLTVL |
| 413 | D3F/HLE- | ARTIFICIAL | QVQLVQSGAEVKKPGASVKVSCKASGYTFTDYHMHWVRQAPGQCLEWMGWIKPISGDTNYAQ |
| | BITE I2E | | KFQGRVTMTRDTSISTAYMELSRLRSDDTAVYYCARDYYSSSWTLYYYYGMDVWGQGTTVTV |
| | | | SSGGGGSGGGGSGGGGSQSALTQPPSASGSPGQSVTSYCTGTSSDVGGYNYVSWYQQHPGKA |
| | | | PKLMIYEVSKRPSGVPDRFSGSKSGNTASLTVSGLQAEDEADYYCSSYAGSNNFVFGCGTKV |
| | | | TVLSGGGGSEVQLVESGGGLVQPGGSLKLSCAASGFTFNKYAINWVRQAPGKGLEWVARIRS |
| | | | KYNNYATYYADAVKDRFTISRDDSKNTVYLQMNNLKTEDTAVYYCARAGNFGSSYISYWAYW |
| | | | GQGTLVTVSSGGGGSGGGGSGGGGSQTVVTQEPSLTVSPGGTVTITCGSSTGAVTSGNYPNW |
| | | | VQKKPGQAPRGLIGGTKFLAPGTPARFSGSLSGGKAALTLSGVQPEDEAEYYCVLWYSNRWV |
| | | | FGSGTKLTVLGGGGDKTHTCPPCPAPELLGGPSVFLFPPKPKDTLMISRTPEVTCVVVDVSH |
| | | | EDPEVKFNWYVDGVEVHNAKTKPCEEQYGSTYRCVSVLTVLHQDWLNGKEYKCKVSNKALPA |
| | | | PIEKTISKAKGQPREPQVYTLPPSREEMTKNQVSLTCLVKGFYPSDIAVEWESNGQPENNYK |
| | | | TTPPVLDSDGSFFLYSKLTVDKSRWQQGNVFSCSVMHEALHNHYTQKSLSLSPGKGGGGSGG |
| | | | GGSGGGGSGGGGSGGGGSGGGGSDKTHTCPPCPAPELLGGPSVFLFPPKPKDTLMISRTPEV |
| | | | TCVVVDVSHEDPEVKFNWYVDGVEVHNAKTKPCEEQYGSTYRCVSVLTVLHQDWLNGKEYKC |
| | | | KVSNKALPAPIEKTISKAKGQPREPQVYTLPPSREEMTKNQVSLTCLVKGFYPSDIAVEWES |
| | | | NGQPENNYKTTPPVLDSDGSFFLYSKLTVDKSRWQQGNVFSCSVMHEALHNHYTQKSLSLSP |
| | | | GK |
| 414 | D3F/SCFV | ARTIFICIAL | QVQLVQSGAEVKKPGASVKVSCKASGYTFTDYHMHWVRQAPGQCLEWMGWIKPISGDTNYAQ |
| | I2C | | KFQGRVTMTRDTSISTAYMELSRLRSDDTAVYYCARDYYSSSWTLYYYYGMDVWGQGTTVTV |
| | | | SSGGGGSGGGGSGGGGSQSALTQPPSASGSPGQSVTSYCTGTSSDVGGYNYVSWYQQHPGKA |
| | | | PKLMIYEVSKRPSGVPDRFSGSKSGNTASLTVSGLQAEDEADYYCSSYAGSNNFVFGCGTKV |
| | | | TVL |
| 415 | D3F/ | ARTIFICIAL | QVQLVQSGAEVKKPGASVKVSCKASGYTFTDYHMHWVRQAPGQCLEWMGWIKPISGDTNYAQ |
| | BISPECIFIC | | KFQGRVTMTRDTSISTAYMELSRLRSDDTAVYYCARDYYSSSWTLYYYYGMDVWGQGTTVTV |
| | MOL I2C | | SSGGGGSGGGGSGGGGSQSALTQPPSASGSPGQSVTSYCTGTSSDVGGYNYVSWYQQHPGKA |
| | | | PKLMIYEVSKRPSGVPDRFSGSKSGNTASLTVSGLQAEDEADYYCSSYAGSNNFVFGCGTKV |
| | | | TVLSGGGGSEVQLVESGGGLVQPGGSLKLSCAASGFTFNKYAMNWVRQAPGKGLEWVARIRS |
| | | | KYNNYATYYADSVKDRFTISRDDSKNTAYLQMNNLKTEDTAVYYCVRHGNFGNSYISYWAYW |
| | | | GQGTLVTVSSGGGGSGGGGSGGGGSQTVVTQEPSLTVSPGGTVTLTCGSSTGAVTSGNYPNW |
| | | | VQQKPGQAPRGLIGGTKFLAPGTPARFSGSLLGGKAALTLSGVQPEDEAEYYCVLWYSNRWV |
| | | | FGGGTKLTVL |
| 416 | D3F/HLE | ARTIFICIAL | QVQLVQSGAEVKKPGASVKVSCKASGYTFTDYHMHWVRQAPGQCLEWMGWIKPISGDTNYAQ |
| | BITE I2C | | KFQGRVTMTRDTSISTAYMELSRLRSDDTAVYYCARDYYSSSWTLYYYYGMDVWGQGTTVTV |
| | | | SSGGGGSGGGGSGGGGSQSALTQPPSASGSPGQSVTSYCTGTSSDVGGYNYVSWYQQHPGKA |
| | | | PKLMIYEVSKRPSGVPDRFSGSKSGNTASLTVSGLQAEDEADYYCSSYAGSNNFVFGCGTKV |
| | | | TVLSGGGGSEVQLVESGGGLVQPGGSLKLSCAASGFTFNKYAMNWVRQAPGKGLEWVARIRS |
| | | | KYNNYATYYADSVKDRFTISRDDSKNTAYLQMNNLKTEDTAVYYCVRHGNFGNSYISYWAYW |
| | | | GQGTLVTVSSGGGGSGGGGSGGGGSQTVVTQEPSLTVSPGGTVTLTCGSSTGAVTSGNYPNW |
| | | | VQQKPGQAPRGLIGGTKFLAPGTPARFSGSLLGGKAALTLSGVQPEDEAEYYCVLWYSNRWV |
| | | | FGGGTKLTVLGGGGDKTHTCPPCPAPELLGGPSVFLFPPKPKDTLMISRTPEVTCVVVDVSH |
| | | | EDPEVKFNWYVDGVEVHNAKTKPCEEQYGSTYRCVSVLTVLHQDWLNGKEYKCKVSNKALPA |
| | | | PIEKTISKAKGQPREPQVYTLPPSREEMTKNQVSLTCLVKGFYPSDIAVEWESNGQPENNYK |
| | | | TTPPVLDSDGSFFLYSKLTVDKSRWQQGNVFSCSVMHEALHNHYTQKSLSLSPGKGGGGSGG |
| | | | GGSGGGGSGGGGSGGGGSGGGGSDKTHTCPPCPAPELLGGPSVFLFPPKPKDTLMISRTPEV |
| | | | TCVVVDVSHEDPEVKFNWYVDGVEVHNAKTKPCEEQYGSTYRCVSVLTVLHQDWLNGKEYKC |
| | | | KVSNKALPAPIEKTISKAKGQPREPQVYTLPPSREEMTKNQVSLTCLVKGFYPSDIAVEWES |
| | | | NGQPENNYKTTPPVLDSDGSFFLYSKLTVDKSRWQQGNVFSCSVMHEALHNHYTQKSLSLSP |
| | | | GK |
| 417 | E4N/VH | ARTIFICIAL | QVQLVQSGAEVKKPGASVKVSCKASGYTFTDYHMHWVRQAPGQCLEWMGWIKPISGDANYAQ |
| | | | KFQGRVTMTRDTSISTAYMELSRLRSDDTAVYYCARDYYSSSFTLYYYYGMDVWGQGTTVTV |
| | | | SS |
| 418 | E4N/VL | ARTIFICIAL | QSALTQPPSASGSPGQSVTISCTGTSSDVGGYNYVSWYQQHPGKAPKLMIYEVSKRPSGVPD |
| | | | RFSGSKSGNTASLTVSGLQAEDEADYYCSSYAGSNNFVFGCGTKVTVL |
| 419 | E4N/CDR-H1 | ARTIFICIAL | DYHMH |
| 420 | E4N/CDR-H2 | ARTIFICIAL | WIKPISGDANYAQKFQG |
| 421 | E4N/CDR-H3 | ARTIFICIAL | DYYSSSFTLYYYYGMDV |
| 422 | E4N/CDR-L1 | ARTIFICIAL | TGTSSDVGGYNYVS |
| 423 | E4N/CDR-L2 | ARTIFICIAL | EVSKRPS |
| 424 | E4N/CDR-L3 | ARTIFICIAL | SSYAGSNNFV |
| 425 | E4N/SCFV | ARTIFICIAL | QVQLVQSGAEVKKPGASVKVSCKASGYTFTDYHMHWVRQAPGQCLEWMGWIKPISGDANYAQ |
| | I2F | | KFQGRVTMTRDTSISTAYMELSRLRSDDTAVYYCARDYYSSSFTLYYYYGMDVWGQGTTVTV |
| | | | SSGGGGSGGGGSGGGGSQSALTQPPSASGSPGQSVTISCTGTSSDVGGYNYVSWYQQHPGKA |
| | | | PKLMIYEVSKRPSGVPDRFSGSKSGNTASLTVSGLQAEDEADYYCSSYAGSNNFVFGCGTKV |
| | | | TVL |
| 426 | E4N/ | ARTIFICIAL | QVQLVQSGAEVKKPGASVKVSCKASGYTFTDYHMHWVRQAPGQCLEWMGWIKPISGDANYAQ |
| | BISPECIFIC | | KFQGRVTMTRDTSISTAYMELSRLRSDDTAVYYCARDYYSSSFTLYYYYGMDVWGQGTTVTV |
| | MOL I2E | | SSGGGGSGGGGSGGGGSQSALTQPPSASGSPGQSVTISCTGTSSDVGGYNYVSWYQQHPGKA |
| | | | PKLMIYEVSKRPSGVPDRFSGSKSGNTASLTVSGLQAEDEADYYCSSYAGSNNFVFGCGTKV |
| | | | TVLSGGGGSEVQLVESGGGLVQPGGSLKLSCAASGFTFNKYAINWVRQAPGKGLEWVARIRS |
| | | | KYNNYATYYADAVKDRFTISRDDSKNTVYLQMNNLKTEDTAVYYCARAGNFGSSYISYWAYW |
| | | | GQGTLVTVSSGGGGSGGGGSGGGGSQTVVTQEPSLTVSPGGTVTITCGSSTGAVTSGNYPNW |
| | | | VQKKPGQAPRGLIGGTKFLAPGTPARFSGSLSGGKAALTLSGVQPEDEAEYYCVLWYSNRWV |
| | | | FGSGTKLTVL |
| 427 | E4N/HLE- | ARTIFICIAL | QVQLVQSGAEVKKPGASVKVSCKASGYTFTDYHMHWVRQAPGQCLEWMGWIKPISGDANYAQ |
| | BITE I2E | | KFQGRVTMTRDTSISTAYMELSRLRSDDTAVYYCARDYYSSSFTLYYYYGMDVWGQGTTVTV |
| | | | SSGGGGSGGGGSGGGGSQSALTQPPSASGSPGQSVTISCTGTSSDVGGYNYVSWYQQHPGKA |
| | | | PKLMIYEVSKRPSGVPDRFSGSKSGNTASLTVSGLQAEDEADYYCSSYAGSNNFVFGCGTKV |
| | | | TVLSGGGGSEVQLVESGGGLVQPGGSLKLSCAASGFTFNKYAINWVRQAPGKGLEWVARIRS |
| | | | KYNNYATYYADAVKDRFTISRDDSKNTVYLQMNNLKTEDTAVYYCARAGNFGSSYISYWAYW |
| | | | GQGTLVTVSSGGGGSGGGGSGGGGSQTVVTQEPSLTVSPGGTVTITCGSSTGAVTSGNYPNW |
| | | | VQKKPGQAPRGLIGGTKFLAPGTPARFSGSLSGGKAALTLSGVQPEDEAEYYCVLWYSNRWV |
| | | | FGSGTKLTVLGGGGDKTHTCPPCPAPELLGGPSVFLFPPKPKDTLMISRTPEVTCVVVDVSH |
| | | | EDPEVKFNWYVDGVEVHNAKTKPCEEQYGSTYRCVSVLTVLHQDWLNGKEYKCKVSNKALPA |
| | | | PIEKTISKAKGQPREPQVYTLPPSREEMTKNQVSLTCLVKGFYPSDIAVEWESNGQPENNYK |
| | | | TTPPVLDSDGSFFLYSKLTVDKSRWQQGNVFSCSVMHEALHNHYTQKSLSLSPGKGGGGSGG |
| | | | GGSGGGGSGGGGSGGGGSGGGGSDKTHTCPPCPAPELLGGPSVFLFPPKPKDTLMISRTPEV |
| | | | TCVVVDVSHEDPEVKFNWYVDGVEVHNAKTKPCEEQYGSTYRCVSVLTVLHQDWLNGKEYKC |
| | | | KVSNKALPAPIEKTISKAKGQPREPQVYTLPPSREEMTKNQVSLTCLVKGFYPSDIAVEWES |
| | | | NGQPENNYKTTPPVLDSDGSFFLYSKLTVDKSRWQQGNVFSCSVMHEALHNHYTQKSLSLSP |
| | | | GK |
| 428 | E4N/SCFV | ARTIFICIAL | QVQLVQSGAEVKKPGASVKVSCKASGYTFTDYHMHWVRQAPGQCLEWMGWIKPISGDANYAQ |
| | I2C | | KFQGRVTMTRDTSISTAYMELSRLRSDDTAVYYCARDYYSSSFTLYYYYGMDVWGQGTTVTV |
| | | | SSGGGGSGGGGSGGGGSQSALTQPPSASGSPGQSVTISCTGTSSDVGGYNYVSWYQQHPGKA |
| | | | PKLMIYEVSKRPSGVPDRFSGSKSGNTASLTVSGLQAEDEADYYCSSYAGSNNFVFGCGTKV |
| | | | TVL |
| 429 | E4N/ | ARTIFICIAL | QVQLVQSGAEVKKPGASVKVSCKASGYTFTDYHMHWVRQAPGQCLEWMGWIKPISGDANYAQ |
| | BISPECIFIC | | KFQGRVTMTRDTSISTAYMELSRLRSDDTAVYYCARDYYSSSFTLYYYYGMDVWGQGTTVTV |
| | MOL I2C | | SSGGGGSGGGGSGGGGSQSALTQPPSASGSPGQSVTISCTGTSSDVGGYNYVSWYQQHPGKA |
| | | | PKLMIYEVSKRPSGVPDRFSGSKSGNTASLTVSGLQAEDEADYYCSSYAGSNNFVFGCGTKV |
| | | | TVLSGGGGSEVQLVESGGGLVQPGGSLKLSCAASGFTFNKYAMNWVRQAPGKGLEWVARIRS |
| | | | KYNNYATYYADSVKDRFTISRDDSKNTAYLQMNNLKTEDTAVYYCVRHGNFGNSYISYWAYW |
| | | | GQGTLVTVSSGGGGSGGGGSGGGGSQTVVTQEPSLTVSPGGTVTLTCGSSTGAVTSGNYPNW |
| | | | VQQKPGQAPRGLIGGTKFLAPGTPARFSGSLLGGKAALTLSGVQPEDEAEYYCVLWYSNRWV |
| | | | FGGGTKLTVL |
| 430 | E4N/HLE | ARTIFICIAL | QVQLVQSGAEVKKPGASVKVSCKASGYTFTDYHMHWVRQAPGQCLEWMGWIKPISGDANYAQ |
| | BITE I2C | | KFQGRVTMTRDTSISTAYMELSRLRSDDTAVYYCARDYYSSSFTLYYYYGMDVWGQGTTVTV |
| | | | SSGGGGSGGGGSGGGGSQSALTQPPSASGSPGQSVTISCTGTSSDVGGYNYVSWYQQHPGKA |
| | | | PKLMIYEVSKRPSGVPDRFSGSKSGNTASLTVSGLQAEDEADYYCSSYAGSNNFVFGCGTKV |
| | | | TVLSGGGGSEVQLVESGGGLVQPGGSLKLSCAASGFTFNKYAMNWVRQAPGKGLEWVARIRS |
| | | | KYNNYATYYADSVKDRFTISRDDSKNTAYLQMNNLKTEDTAVYYCVRHGNFGNSYISYWAYW |
| | | | GQGTLVTVSSGGGGSGGGGSGGGGSQTVVTQEPSLTVSPGGTVTLTCGSSTGAVTSGNYPNW |
| | | | VQQKPGQAPRGLIGGTKFLAPGTPARFSGSLLGGKAALTLSGVQPEDEAEYYCVLWYSNRWV |
| | | | FGGGTKLTVLGGGGDKTHTCPPCPAPELLGGPSVFLFPPKPKDTLMISRTPEVTCVVVDVSH |
| | | | EDPEVKFNWYVDGVEVHNAKTKPCEEQYGSTYRCVSVLTVLHQDWLNGKEYKCKVSNKALPA |
| | | | PIEKTISKAKGQPREPQVYTLPPSREEMTKNQVSLTCLVKGFYPSDIAVEWESNGQPENNYK |
| | | | TTPPVLDSDGSFFLYSKLTVDKSRWQQGNVFSCSVMHEALHNHYTQKSLSLSPGKGGGGSGG |
| | | | GGSGGGGSGGGGSGGGGSGGGGSDKTHTCPPCPAPELLGGPSVFLFPPKPKDTLMISRTPEV |
| | | | TCVVVDVSHEDPEVKFNWYVDGVEVHNAKTKPCEEQYGSTYRCVSVLTVLHQDWLNGKEYKC |
| | | | KVSNKALPAPIEKTISKAKGQPREPQVYTLPPSREEMTKNQVSLTCLVKGFYPSDIAVEWES |
| | | | NGQPENNYKTTPPVLDSDGSFFLYSKLTVDKSRWQQGNVFSCSVMHEALHNHYTQKSLSLSP |
| | | | GK |
| 431 | CL6 AE3-20 X | ARTIFICIAL | SYTMS |
| | I2C X SCFC/ | | |
| | HCDR1 | | |
| 432 | CL6 AE3-20/ | ARTIFICIAL | TISSGGGRTYYPDSVKG |
| | HCDR2 | | |
| 433 | CL6 AE3-20/ | ARTIFICIAL | GDYRYDGFAY |
| | HCDR3 | | |
| 434 | CL6 AE3-20/ | ARTIFICIAL | RASENIDSYLA |
| | LCDR1 | | |
| 435 | CL6 AE3-20/ | ARTIFICIAL | ASTLLVD |
| | LCDR2 | | |
| 436 | CL6 AE3-20/ | ARTIFICIAL | QHYYSIPYT |
| | LCDR3 | | |
| 437 | CL6 AE3-20/ | ARTIFICIAL | EVKLVESGGGLVKPGGSLKLSCAASGFTFNSYTMSWVRQTPAKRLEWVVTISSGGGRTYYPD |
| | VH | | SVKGRFTISRDNARNTLYLQMSSLRSEDTAMYYCIRGDYRYDGFAYWGQGTLVTVST |
| 438 | CL6 AE3-20/ | ARTIFICIAL | DIQMTQSPASLSASVGETVTITCRASENIDSYLAWYQQKQGKSPQLLVYASTLLVDGVPSRF |
| | VL | | SGSRSGTQFSLKINSLQSEDVARYYCQHYYSIPYTFGSGTKLEIK |
| 439 | CL6 AE3-20/ | ARTIFICIAL | EVKLVESGGGLVKPGGSLKLSCAASGFTFNSYTMSWVRQTPAKRLEWVVTISSGGGRTYYPD |
| | SCFV | | SVKGRFTISRDNARNTLYLQMSSLRSEDTAMYYCIRGDYRYDGFAYWGQGTLVTVSTGGGGS |
| | | | GGGGSGGGGSDIQMTQSPASLSASVGETVTITCRASENIDSYLAWYQQKQGKSPQLLVYAST |
| | | | LLVDGVPSRFSGSRSGTQFSLKINSLQSEDVARYYCQHYYSIPYTFGSGTKLEIK |
| 440 | CL6 AE3-20/ | ARTIFICIAL | EVKLVESGGGLVKPGGSLKLSCAASGFTFNSYTMSWVRQTPAKRLEWVVTISSGGGRTYYPD |
| | BISPECIFIC | | SVKGRFTISRDNARNTLYLQMSSLRSEDTAMYYCIRGDYRYDGFAYWGQGTLVTVSTGGGGS |
| | MOL. | | GGGGSGGGGSDIQMTQSPASLSASVGETVTITCRASENIDSYLAWYQQKQGKSPQLLVYAST |
| | | | LLVDGVPSRFSGSRSGTQFSLKINSLQSEDVARYYCQHYYSIPYTFGSGTKLEIKSGGGGSE |
| | | | VQLVESGGGLVQPGGSLKLSCAASGFTFNKYAMNWVRQAPGKGLEWVARIRSKYNNYATYYA |
| | | | DSVKDRFTISRDDSKNTAYLQMNNLKTEDTAVYYCVRHGNFGNSYISYWAYWGQGTLVTVSS |
| | | | GGGGSGGGGSGGGGSQTVVTQEPSLTVSPGGTVTLTCGSSTGAVTSGNYPNWVQQKPGQAPR |
| | | | GLIGGTKFLAPGTPARFSGSLLGGKAALTLSGVQPEDEAEYYCVLWYSNRWVFGGGTKLTVL |
| 441 | CL6 AE3-20/ | ARTIFICIAL | EVKLVESGGGLVKPGGSLKLSCAASGFTFNSYTMSWVRQTPAKRLEWVVTISSGGGRTYYPD |
| | HLE-BITE I2E | | SVKGRFTISRDNARNTLYLQMSSLRSEDTAMYYCIRGDYRYDGFAYWGQGTLVTVSTGGGGS |
| | | | GGGGSGGGGSDIQMTQSPASLSASVGETVTITCRASENIDSYLAWYQQKQGKSPQLLVYAST |
| | | | LLVDGVPSRFSGSRSGTQFSLKINSLQSEDVARYYCQHYYSIPYTFGSGTKLEIKSGGGGSE |
| | | | VQLVESGGGLVQPGGSLKLSCAASGFTFNKYAMNWVRQAPGKGLEWVARIRSKYNNYATYYA |
| | | | DSVKDRFTISRDDSKNTAYLQMNNLKTEDTAVYYCVRHGNFGNSYISYWAYWGQGTLVTVSS |
| | | | GGGGSGGGGSGGGGSQTVVTQEPSLTVSPGGTVTLTCGSSTGAVTSGNYPNWVQQKPGQAPR |
| | | | GLIGGTKFLAPGTPARFSGSLLGGKAALTLSGVQPEDEAEYYCVLWYSNRWVFGGGTKLTVL |
| | | | GGGGDKTHTCPPCPAPELLGGPSVFLFPPKPKDTLMISRTPEVTCVVVDVSHEDPEVKENWY |
| | | | VDGVEVHNAKTKPCEEQYGSTYRCVSVLTVLHQDWLNGKEYKCKVSNKALPAPIEKTISKAK |
| | | | GQPREPQVYTLPPSREEMTKNQVSLTCLVKGFYPSDIAVEWESNGQPENNYKTTPPVLDSDG |
| | | | SFFLYSKLTVDKSRWQQGNVFSCSVMHEALHNHYTQKSLSLSPGKGGGGSGGGGSGGGGSGG |
| | | | GGSGGGGSGGGGSDKTHTCPPCPAPELLGGPSVFLFPPKPKDTLMISRTPEVTCVVVDVSHE |
| | | | DPEVKFNWYVDGVEVHNAKTKPCEEQYGSTYRCVSVLTVLHQDWLNGKEYKCKVSNKALPAP |
| | | | IEKTISKAKGQPREPQVYTLPPSREEMTKNQVSLTCLVKGFYPSDIAVEWESNGQPENNYKT |
| | | | TPPVLDSDGSFFLYSKLTVDKSRWQQGNVFSCSVMHEALHNHYTQKSLSLSPGK |
| 442 | Human CD38 | ARTIFICIAL | QDGNEEMGGITQTPYKVSISGTTVILTCPQYPGSEILWQHNDKNIGGDEDDKNIGSDEDHLS |
| | ECD/ | | LKEFSELEQSGYYVCYPRGSKPEDANFYLYLRARVCENCMEMD |
| 443 | Human CD3€ | ARTIFICIAL | QDGNEEMGGITQTPYKVSISGTTVILT |
| | ECD/pos. | | |
| | 1-27 | | |
| 444 | CDR-L1 of | ARTIFICIAL | GSSTGAVTSGYYPN |
| | H2C | | |
| 445 | CDR-L2 of | ARTIFICIAL | GTKFLAP |
| | H2C | | |
| 446 | CDR-L3 of | ARTIFICIAL | ALWYSNRWV |
| | H2C | | |
| 447 | CDR-L1 of | ARTIFICIAL | RSSTGAVTSGYYPN |
| | E2M | | |
| 448 | CDR-L2 of | ARTIFICIAL | ATDMRPS |
| | E2M | | |
| 449 | CDR-L3 of | ARTIFICIAL | ALWYSNRWV |
| | E2M | | |
| 450 | CDR-L1 of | ARTIFICIAL | GSSTGAVTSGNYPN |
| | F12Q | | |
| 451 | CDR-L2 of | ARTIFICIAL | GTKFLAP |
| | F12Q | | |
| 452 | CDR-L3 of | ARTIFICIAL | VLWYSNRWV |
| | F12Q | | |
| 453 | CDR-H1 of | ARTIFICIAL | IYAMN |
| | F6A | | |
| 454 | CDR-H2 of | ARTIFICIAL | RIRSKYNNYATYYADSVKS |
| | F6A | | |
| 455 | CDR-H3 of | ARTIFICIAL | HGNFGNSYVSFFAY |
| | F6A | | |
| 456 | CDR-H1 of | ARTIFICIAL | KYAMN |
| | H2C | | |
| 457 | CDR-H2 of | ARTIFICIAL | RIRSKYNNYATYYADSVKD |
| | H2C | | |
| 458 | CDR-H3 of | ARTIFICIAL | HGNFGNSYISYWAY |
| | H2C | | |
| 459 | CDR-H1 of | ARTIFICIAL | SYAMN |
| | H1E | | |
| 460 | CDR-H2 of H1E | ARTIFICIAL | RIRSKYNNYATYYADSVKG |
| 461 | CDR-H3 of | ARTIFICIAL | HGNFGNSYLSFWAY |
| | H1E | | |
| 462 | CDR-H1 of | ARTIFICIAL | RYAMN |
| | G4H | | |
| 463 | CDR-H2 of G4H | ARTIFICIAL | RIRSKYNNYATYYADSVKG |
| 464 | CDR-H3 of | ARTIFICIAL | HGNFGNSYLSYFAY |
| | G4H | | |
| 465 | CDR-H1 of | ARTIFICIAL | VYAMN |
| | A2J | | |
| 466 | CDR-H2 of | ARTIFICIAL | RIRSKYNNYATYYADSVKK |
| | A2J | | |
| 467 | CDR-H3 of | ARTIFICIAL | HGNFGNSYLSWWAY |
| | A2J | | |
| 468 | CDR-H1 of E1L | ARTIFICIAL | KYAMN |
| 469 | CDR-H2 of E1L | ARTIFICIAL | RIRSKYNNYATYYADSVKS |
| 470 | CDR-H3 of | ARTIFICIAL | HGNFGNSYTSYYAY |
| | E1L | | |
| 471 | CDR-H1 of E2M | ARTIFICIAL | GYAMN |
| 472 | CDR-H2 of E2M | ARTIFICIAL | RIRSKYNNYATYYADSVKE |
| 473 | CDR-H3 of E2M | ARTIFICIAL | HRNFGNSYLSWFAY |
| 474 | CDR-H1 of F70 | ARTIFICIAL | VYAMN |
| 475 | CDR-H2 of F70 | ARTIFICIAL | RIRSKYNNYATYYADSVKK |
| 476 | CDR-H3 of F70 | ARTIFICIAL | HGNFGNSYISWWAY |
| 477 | CDR-H1 of | ARTIFICIAL | SYAMN |
| | F12Q | | |
| 478 | CDR-H2 of | ARTIFICIAL | RIRSKYNNYATYYADSVKG |
| | F12Q | | |
| 479 | CDR-H3 of F12Q | ARTIFICIAL | HGNFGNSYVSWWAY |
| 480 | CDR-H1 of | ARTIFICIAL | KYAMN |
| | I2C | | |
| 481 | CDR-H2 of | ARTIFICIAL | RIRSKYNNYATYYADSVKD |
| | I2C | | |
| 482 | CDR-H3 of | ARTIFICIAL | HGNFGNSYISYWAY |
| | I2C | | |
| 483 | CDR-L2 of | ARTIFICIAL | GTKFLAP |
| | H2C | | |
| 484 | CDR-L3 of | ARTIFICIAL | ALWYSNRWV |
| | H2C | | |
| 485 | CDR-H1 of | ARTIFICIAL | KYAMN |
| | H2C | | |
| 486 | CDR-L1 of | ARTIFICIAL | GSSTGAVTSGYYPN |
| | H1E | | |
| 487 | CDR-L2 of | ARTIFICIAL | GTKFLAP |
| | H1E | | |
| 488 | CDR-L3 of | ARTIFICIAL | ALWYSNRWV |
| | H1E | | |
| 489 | CDR-H1 of H1E | ARTIFICIAL | SYAMN |
| 490 | CDR-H2 of H1E | ARTIFICIAL | RIRSKYNNYATYYADSVKG |
| 491 | CDR-H3 of H1E | ARTIFICIAL | HGNFGNSYLSFWAY |
| 492 | CDR-L1 of | ARTIFICIAL | GSSTGAVTSGYYPN |
| | G4H | | |
| 493 | CDR-L2 of G4H | ARTIFICIAL | GTKFLAP |
| 494 | CDR-L3 of G4H | ARTIFICIAL | ALWYSNRWV |
| 495 | CDR-L1 of | ARTIFICIAL | RSSTGAVTSGYYPN |
| | A2J | | |
| 496 | CDR-L2 of | ARTIFICIAL | ATDMRPS |
| | A2J | | |
| 497 | CDR-L3 of | ARTIFICIAL | ALWYSNRWV |
| | A2J | | |
| 498 | CDR-L1 of E1L | ARTIFICIAL | GSSTGAVTSGYYPN |
| 499 | CDR-L2 of E1L | ARTIFICIAL | GTKFLAP |
| 500 | CDR-L3 of | ARTIFICIAL | ALWYSNRWV |
| | E1L | | |
| 501 | CDR-L1 of | ARTIFICIAL | GSSTGAVTSGYYPN |
| | F70 | | |
| 502 | CDR-L2 of | ARTIFICIAL | GTKFLAP |
| | F70 | | |
| 503 | CDR-L3 of F70 | ARTIFICIAL | ALWYSNRWV |
| 504 | CDR-L1 of I2C | ARTIFICIAL | GSSTGAVTSGNYPN |
| 505 | CDR-L2 of | ARTIFICIAL | GTKFLAP |
| | I2C | | |
| 506 | CDR-L3 of | ARTIFICIAL | VLWYSNRWV |
| | I2C | | |
| 507 | VL of H2C | ARTIFICIAL | QTVVTQEPSLTVSPGGTVTLTCGSSTGAVTSGYYPNWVQQKPGQAPRGLIGGTKFLAPGTPA |
| | | | RFSGSLLGGKAALTLSGVQPEDEAEYYCALWYSNRWVFGGGTKLTVL |
| 508 | VL of E2M | ARTIFICIAL | QTVVTQEPSLTVSPGGTVTLTCRSSTGAVTSGYYPNWVQQKPGQAPRGLIGATDMRPSGTPA |
| | | | RFSGSLLGGKAALTLSGVQPEDEAEYYCALWYSNRWVFGGGTKLTVL |
| 509 | VL of F12Q | ARTIFICIAL | QTVVTQEPSLTVSPGGTVTLTCGSSTGAVTSGNYPNWVQQKPGQAPRGLIGGTKFLAPGTPA |
| | | | RFSGSLLGGKAALTLSGVQPEDEAEYYCVLWYSNRWVFGGGTKLTVL |
| 510 | VL variant | ARTIFICIAL | ELVVTQEPSLTVSPGGTVTLTCGSSTGAVTSGYYPNWVQQKPGQAPRGLIGGTKFLAPGTPA |
| | of H2C | | RFSGSLLGGKAALTLSGVQPEDEAEYYCALWYSNRWVFGGGTKLTVL |
| 511 | VL variant | ARTIFICIAL | ELVVTQEPSLTVSPGGTVTLTCRSSTGAVTSGYYPNWVQQKPGQAPRGLIGATDMRPSGTPA |
| | of A2J | | RFSGSLLGGKAALTLSGVQPEDEAEYYCALWYSNRWVFGGGTKLTVL |
| 512 | VL variant | ARTIFICIAL | ELVVTQEPSLTVSPGGTVTLTCGSSTGAVTSGNYPNWVQQKPGQAPRGLIGGTKFLAPGTPA |
| | of F12Q | | RFSGSLLGGKAALTLSGVQPEDEAEYYCVLWYSNRWVFGGGTKLTVL |
| 513 | VH of F6A | ARTIFICIAL | EVQLVESGGGLVQPGGSLKLSCAASGFTFNIYAMNWVRQAPGKGLEWVARIRSKYNNYATYY |
| | | | ADSVKSRFTISRDDSKNTAYLQMNNLKTEDTAVYYCVRHGNFGNSYVSFFAYWGQGTLVTVS |
| | | | S |
| 514 | VH of H2C | ARTIFICIAL | EVQLVESGGGLVQPGGSLKLSCAASGFTFNKYAMNWVRQAPGKGLEWVARIRSKYNNYATYY |
| | | | ADSVKDRFTISRDDSKNTAYLQMNNLKTEDTAVYYCVRHGNFGNSYISYWAYWGQGTLVTVS |
| | | | S |
| 515 | VH of H1E | ARTIFICIAL | EVQLVESGGGLEQPGGSLKLSCAASGFTFNSYAMNWVRQAPGKGLEWVARIRSKYNNYATYY |
| | | | ADSVKGRFTISRDDSKNTAYLQMNNLKTEDTAVYYCVRHGNFGNSYLSFWAYWGQGTLVTVS |
| | | | S |
| 516 | VH of G4H | ARTIFICIAL | EVQLVESGGGLVQPGGSLKLSCAASGFTFNRYAMNWVRQAPGKGLEWVARIRSKYNNYATYY |
| | | | ADSVKGRFTISRDDSKNTAYLQMNNLKTEDTAVYYCVRHGNFGNSYLSYFAYWGQGTLVTVS |
| | | | S |
| 517 | VH of A2J | ARTIFICIAL | EVQLVESGGGLVQPGGSLKLSCAASGFTFNVYAMNWVRQAPGKGLEWVARIRSKYNNYATYY |
| | | | ADSVKKRFTISRDDSKNTAYLQMNNLKTEDTAVYYCVRHGNFGNSYLSWWAYWGQGTLVTVS |
| | | | S |
| 518 | VH of E1L | ARTIFICIAL | EVQLVESGGGLVQPGGSLKLSCAASGFTFNKYAMNWVRQAPGKGLEWVARIRSKYNNYATYY |
| | | | ADSVKSRFTISRDDSKNTAYLQMNNLKTEDTAVYYCVRHGNFGNSYTSYYAYWGQGTLVTVS |
| | | | S |
| 519 | VH of E2M | ARTIFICIAL | EVQLVESGGGLVQPGGSLKLSCAASGFTFNGYAMNWVRQAPGKGLEWVARIRSKYNNYATYY |
| | | | ADSVKERFTISRDDSKNTAYLQMNNLKTEDTAVYYCVRHRNFGNSYLSWFAYWGQGTLVTVS |
| | | | S |
| 520 | VH of F70 | ARTIFICIAL | EVQLVESGGGLVQPGGSLKLSCAASGFTFNVYAMNWVRQAPGKGLEWVARIRSKYNNYATYY |
| | | | ADSVKKRFTISRDDSKNTAYLQMNNLKTEDTAVYYCVRHGNFGNSYISWWAYWGQGTLVTVS |
| | | | S |
| 521 | VH of F12Q | ARTIFICIAL | EVQLVESGGGLVQPGGSLKLSCAASGFTFNSYAMNWVRQAPGKGLEWVARIRSKYNNYATYY |
| | | | ADSVKGRFTISRDDSKNTAYLQMNNLKTEDTAVYYCVRHGNFGNSYVSWWAYWGQGTLVTVS |
| | | | S |
| 522 | VH of I2C | ARTIFICIAL | EVQLVESGGGLVQPGGSLKLSCAASGFTFNKYAMNWVRQAPGKGLEWVARIRSKYNNYATYY |
| | | | ADSVKDRFTISRDDSKNTAYLQMNNLKTEDTAVYYCVRHGNFGNSYISYWAYWGQGTLVTVS |
| | | | S |
| 523 | VH of F12q | ARTIFICIAL | EVQLVESGGGLVQPGGSLRLSCAASGFTFNSYAMNWVRQAPGKGLEWVARIRSKYNNYATYY |
| | | | ADSVKGRFTISRDDSKNTAYLQMNSLKTEDTAVYYCVRHGNFGNSYVSWWAYWGQGTLVTVS |
| | | | S |
| 524 | VH variant | ARTIFICIAL | EVQLLESGGGLVQPGGSLKLSCAASGFTFNIYAMNWVRQAPGKGLEWVARIRSKYNNYATYY |
| | of F6A | | ADSVKSRFTISRDDSKNTAYLQMNNLKTEDTAVYYCVRHGNFGNSYVSFFAYWGQGTLVTVS |
| | | | S |
| 525 | VH variant | ARTIFICIAL | EVQLLESGGGLVQPGGSLKLSCAASGFTFNKYAMNWVRQAPGKGLEWVARIRSKYNNYATYY |
| | of H2C | | ADSVKDRFTISRDDSKNTAYLQMNNLKTEDTAVYYCVRHGNFGNSYISYWAYWGQGTLVTVS |
| | | | S |
| 526 | VH variant | ARTIFICIAL | EVQLLESGGGLEQPGGSLKLSCAASGFTFNSYAMNWVRQAPGKGLEWVARIRSKYNNYATYY |
| | of H1E | | ADSVKGRFTISRDDSKNTAYLQMNNLKTEDTAVYYCVRHGNFGNSYLSFWAYWGQGTLVTVS |
| | | | S |
| 527 | VH variant | ARTIFICIAL | EVQLLESGGGLVQPGGSLKLSCAASGFTFNRYAMNWVRQAPGKGLEWVARIRSKYNNYATYY |
| | of G4H | | ADSVKGRFTISRDDSKNTAYLQMNNLKTEDTAVYYCVRHGNFGNSYLSYFAYWGQGTLVTVS |
| | | | S |
| 528 | VH variant | ARTIFICIAL | EVQLLESGGGLVQPGGSLKLSCAASGFTFNVYAMNWVRQAPGKGLEWVARIRSKYNNYATYY |
| | of A2J | | ADSVKKRFTISRDDSKNTAYLQMNNLKTEDTAVYYCVRHGNFGNSYLSWWAYWGQGTLVTVS |
| | | | S |
| 529 | VH variant | ARTIFICIAL | EVQLLESGGGLVQPGGSLKLSCAASGFTFNKYAMNWVRQAPGKGLEWVARIRSKYNNYATYY |
| | of E1L | | ADSVKSRFTISRDDSKNTAYLQMNNLKTEDTAVYYCVRHGNFGNSYTSYYAYWGQGTLVTVS |
| | | | S |
| 530 | VH variant | ARTIFICIAL | EVQLLESGGGLVQPGGSLKLSCAASGFTFNGYAMNWVRQAPGKGLEWVARIRSKYNNYATYY |
| | of E2M | | ADSVKERFTISRDDSKNTAYLQMNNLKTEDTAVYYCVRHRNFGNSYLSWFAYWGQGTLVTVS |
| | | | S |
| 531 | VH variant | ARTIFICIAL | EVQLLESGGGLVQPGGSLKLSCAASGFTFNVYAMNWVRQAPGKGLEWVARIRSKYNNYATYY |
| | of F70 | | ADSVKKRFTISRDDSKNTAYLQMNNLKTEDTAVYYCVRHGNFGNSYISWWAYWGQGTLVTVS |
| | | | S |
| 532 | VH variant | ARTIFICIAL | EVQLLESGGGLVQPGGSLKLSCAASGFTFNSYAMNWVRQAPGKGLEWVARIRSKYNNYATYY |
| | of F12Q | | ADSVKGRFTISRDDSKNTAYLQMNNLKTEDTAVYYCVRHGNFGNSYVSWWAYWGQGTLVTVS |
| | | | S |
| 533 | VH variant | ARTIFICIAL | EVQLLESGGGLVQPGGSLKLSCAASGFTFNKYAMNWVRQAPGKGLEWVARIRSKYNNYATYY |
| | of I2C | | ADSVKDRFTISRDDSKNTAYLQMNNLKTEDTAVYYCVRHGNFGNSYISYWAYWGQGTLVTVS |
| | | | S |
| 534 | VL of F6A | ARTIFICIAL | QTVVTQEPSLTVSPGGTVTLTCGSSTGAVTSGYYPNWVQQKPGQAPRGLIGGTKFLAPGTPA |
| | | | RFSGSLLGGKAALTLSGVQPEDEAEYYCALWYSNRWVFGGGTKLTVL |
| 535 | VL of H1E | ARTIFICIAL | QTVVTQEPSLTVSPGGTVTLTCGSSTGAVTSGYYPNWVQQKPGQAPRGLIGGTKFLAPGTPA |
| | | | RFSGSLLGGKAALTLSGVQPEDEAEYYCALWYSNRWVFGGGTKLTVL |
| 536 | VL of G4H | ARTIFICIAL | QTVVTQEPSLTVSPGGTVTLTCGSSTGAVTSGYYPNWVQQKPGQAPRGLIGGTKFLAPGTPA |
| | | | RFSGSLLGGKAALTLSGVQPEDEAEYYCALWYSNRWVFGGGTKLTVL |
| 537 | VL of A2J | ARTIFICIAL | QTVVTQEPSLTVSPGGTVTLTCRSSTGAVTSGYYPNWVQQKPGQAPRGLIGATDMRPSGTPA |
| | | | RFSGSLLGGKAALTLSGVQPEDEAEYYCALWYSNRWVFGGGTKLTVL |
| 538 | VL of E1L | ARTIFICIAL | QTVVTQEPSLTVSPGGTVTLTCGSSTGAVTSGYYPNWVQQKPGQAPRGLIGGTKFLAPGTPA |
| | | | RFSGSLLGGKAALTLSGVQPEDEAEYYCALWYSNRWVFGGGTKLTVL |
| 539 | VL of F70 | ARTIFICIAL | QTVVTQEPSLTVSPGGTVTLTCGSSTGAVTSGYYPNWVQQKPGQAPRGLIGGTKFLAPGTPA |
| | | | RFSGSLLGGKAALTLSGVQPEDEAEYYCALWYSNRWVFGGGTKLTVL |
| 540 | VL of I2C | ARTIFICIAL | QTVVTQEPSLTVSPGGTVTLTCGSSTGAVTSGNYPNWVQQKPGQAPRGLIGGTKFLAPGTPA |
| | | | RFSGSLLGGKAALTLSGVQPEDEAEYYCVLWYSNRWVFGGGTKLTVL |
| 541 | VL of F12q | ARTIFICIAL | QTVVTQEPSLTVSPGGTVTLTCGSSTGAVTSGNYPNWVQQKPGQAPRGLIGGTKFLAPGTPA |
| | | | RFSGSLLGGKAALTLSGVQPEDEAEYYCVLWYSNRWVFGGGTKLTVL |
| 542 | ScFv of F6A | ARTIFICIAL | EVQLVESGGGLVQPGGSLKLSCAASGFTFNIYAMNWVRQAPGKGLEWVARIRSKYNNYATYY |
| | | | ADSVKSRFTISRDDSKNTAYLQMNNLKTEDTAVYYCVRHGNFGNSYVSFFAYWGQGTLVTVS |
| | | | SGGGGSGGGGSGGGGSQTVVTQEPSLTVSPGGTVTLTCGSSTGAVTSGYYPNWVQQKPGQAP |
| | | | RGLIGGTKFLAPGTPARFSGSLLGGKAALTLSGVQPEDEAEYYCALWYSNRWVFGGGTKLTV |
| | | | I |
| 543 | ScFv of H2C | ARTIFICIAL | EVQLVESGGGLVQPGGSLKLSCAASGFTFNKYAMNWVRQAPGKGLEWVARIRSKYNNYATYY |
| | | | ADSVKDRFTISRDDSKNTAYLQMNNLKTEDTAVYYCVRHGNFGNSYISYWAYWGQGTLVTVS |
| | | | SGGGGSGGGGSGGGGSQTVVTQEPSLTVSPGGTVTLTCGSSTGAVTSGYYPNWVQQKPGQAP |
| | | | RGLIGGTKFLAPGTPARFSGSLLGGKAALTLSGVQPEDEAEYYCALWYSNRWVFGGGTKLTV |
| | | | L |
| 544 | ScFv of H1E | ARTIFICIAL | EVQLVESGGGLEQPGGSLKLSCAASGFTFNSYAMNWVRQAPGKGLEWVARIRSKYNNYATYY |
| | | | ADSVKGRFTISRDDSKNTAYLQMNNLKTEDTAVYYCVRHGNFGNSYLSFWAYWGQGTLVTVS |
| | | | SGGGGSGGGGSGGGGSQTVVTQEPSLTVSPGGTVTLTCGSSTGAVTSGYYPNWVQQKPGQAP |
| | | | RGLIGGTKFLAPGTPARFSGSLLGGKAALTLSGVQPEDEAEYYCALWYSNRWVFGGGTKLTV |
| | | | I |
| 545 | SCFv of G4H | ARTIFICIAL | EVQLVESGGGLVQPGGSLKLSCAASGFTFNRYAMNWVRQAPGKGLEWVARIRSKYNNYATYY |
| | | | ADSVKGRFTISRDDSKNTAYLQMNNLKTEDTAVYYCVRHGNFGNSYLSYFAYWGQGTLVTVS |
| | | | SGGGGSGGGGSGGGGSQTVVTQEPSLTVSPGGTVTLTCGSSTGAVTSGYYPNWVQQKPGQAP |
| | | | RGLIGGTKFLAPGTPARFSGSLLGGKAALTLSGVQPEDEAEYYCALWYSNRWVFGGGTKLTV |
| | | | I |
| 546 | ScFv of A2J | ARTIFICIAL | EVQLVESGGGLVQPGGSLKLSCAASGFTFNVYAMNWVRQAPGKGLEWVARIRSKYNNYATYY |
| | | | ADSVKKRFTISRDDSKNTAYLQMNNLKTEDTAVYYCVRHGNFGNSYLSWWAYWGQGTLVTVS |
| | | | SGGGGSGGGGSGGGGSQTVVTQEPSLTVSPGGTVTLTCRSSTGAVTSGYYPNWVQQKPGQAP |
| | | | RGLIGATDMRPSGTPARFSGSLLGGKAALTLSGVQPEDEAEYYCALWYSNRWVFGGGTKLTV |
| | | | L |
| 547 | ScFv of E1L | ARTIFICIAL | EVQLVESGGGLVQPGGSLKLSCAASGFTFNKYAMNWVRQAPGKGLEWVARIRSKYNNYATYY |
| | | | ADSVKSRFTISRDDSKNTAYLQMNNLKTEDTAVYYCVRHGNFGNSYTSYYAYWGQGTLVTVS |
| | | | SGGGGSGGGGSGGGGSQTVVTQEPSLTVSPGGTVTLTCGSSTGAVTSGYYPNWVQQKPGQAP |
| | | | RGLIGGTKFLAPGTPARFSGSLLGGKAALTLSGVQPEDEAEYYCALWYSNRWVFGGGTKLTV |
| | | | L |
| 548 | SCFv of E2M | ARTIFICIAL | EVQLVESGGGLVQPGGSLKLSCAASGFTFNGYAMNWVRQAPGKGLEWVARIRSKYNNYATYY |
| | | | ADSVKERFTISRDDSKNTAYLQMNNLKTEDTAVYYCVRHRNFGNSYLSWFAYWGQGTLVTVS |
| | | | SGGGGSGGGGSGGGGSQTVVTQEPSLTVSPGGTVTLTCRSSTGAVTSGYYPNWVQQKPGQAP |
| | | | RGLIGATDMRPSGTPARFSGSLLGGKAALTLSGVQPEDEAEYYCALWYSNRWVFGGGTKLTV |
| | | | L |
| 549 | ScFv of F70 | ARTIFICIAL | EVQLVESGGGLVQPGGSLKLSCAASGFTFNVYAMNWVRQAPGKGLEWVARIRSKYNNYATYY |
| | | | ADSVKKRFTISRDDSKNTAYLQMNNLKTEDTAVYYCVRHGNFGNSYISWWAYWGQGTLVTVS |
| | | | SGGGGSGGGGSGGGGSQTVVTQEPSLTVSPGGTVTLTCGSSTGAVTSGYYPNWVQQKPGQAP |
| | | | RGLIGGTKFLAPGTPARFSGSLLGGKAALTLSGVQPEDEAEYYCALWYSNRWVFGGGTKLTV |
| | | | L |
| 550 | ScFv of F12Q | ARTIFICIAL | EVQLVESGGGLVQPGGSLKLSCAASGFTFNSYAMNWVRQAPGKGLEWVARIRSKYNNYATYY |
| | | | ADSVKGRFTISRDDSKNTAYLQMNNLKTEDTAVYYCVRHGNFGNSYVSWWAYWGQGTLVTVS |
| | | | SGGGGSGGGGSGGGGSQTVVTQEPSLTVSPGGTVTLTCGSSTGAVTSGNYPNWVQQKPGQAP |
| | | | RGLIGGTKFLAPGTPARFSGSLLGGKAALTLSGVQPEDEAEYYCVLWYSNRWVFGGGTKLTV |
| | | | I |
| 551 | ScFv of I2C | ARTIFICIAL | EVQLVESGGGLVQPGGSLKLSCAASGFTFNKYAMNWVRQAPGKGLEWVARIRSKYNNYATYY |
| | | | ADSVKDRFTISRDDSKNTAYLQMNNLKTEDTAVYYCVRHGNFGNSYISYWAYWGQGTLVTVS |
| | | | SGGGGSGGGGSGGGGSQTVVTQEPSLTVSPGGTVTLTCGSSTGAVTSGNYPNWVQQKPGQAP |
| | | | RGLIGGTKFLAPGTPARFSGSLLGGKAALTLSGVQPEDEAEYYCVLWYSNRWVFGGGTKLTV |
| | | | L |
| 552 | ScFv of F12q | ARTIFICIAL | EVQLVESGGGLVQPGGSLRLSCAASGFTFNSYAMNWVRQAPGKGLEWVARIRSKYNNYATYY |
| | | | ADSVKGRFTISRDDSKNTAYLQMNSLKTEDTAVYYCVRHGNFGNSYVSWWAYWGQGTLVTVS |
| | | | SGGGGSGGGGSGGGGSQTVVTQEPSLTVSPGGTVTLTCGSSTGAVTSGNYPNWVQQKPGQAP |
| | | | RGLIGGTKFLAPGTPARFSGSLLGGKAALTLSGVQPEDEAEYYCVLWYSNRWVFGGGTKLTV |
| | | | L |
| 553 | scFv variant | ARTIFICIAL | EVQLLESGGGLVQPGGSLKLSCAASGFTFNIYAMNWVRQAPGKGLEWVARIRSKYNNYATYY |
| | of F6A | | ADSVKSRFTISRDDSKNTAYLQMNNLKTEDTAVYYCVRHGNFGNSYVSFFAYWGQGTLVTVS |
| | | | SGGGGSGGGGSGGGGSELVVTQEPSLTVSPGGTVTLTCGSSTGAVTSGYYPNWVQQKPGQAP |
| | | | RGLIGGTKFLAPGTPARFSGSLLGGKAALTLSGVQPEDEAEYYCALWYSNRWVFGGGTKLTV |
| | | | I |
| 554 | scFv variant | ARTIFICIAL | EVQLLESGGGLVQPGGSLKLSCAASGFTFNKYAMNWVRQAPGKGLEWVARIRSKYNNYATYY |
| | of H2C | | ADSVKDRFTISRDDSKNTAYLQMNNLKTEDTAVYYCVRHGNFGNSYISYWAYWGQGTLVTVS |
| | | | SGGGGSGGGGSGGGGSELVVTQEPSLTVSPGGTVTLTCGSSTGAVTSGYYPNWVQQKPGQAP |
| | | | RGLIGGTKFLAPGTPARFSGSLLGGKAALTLSGVQPEDEAEYYCALWYSNRWVFGGGTKLTV |
| | | | L |
| 555 | scFv variant | ARTIFICIAL | EVQLLESGGGLEQPGGSLKLSCAASGFTFNSYAMNWVRQAPGKGLEWVARIRSKYNNYATYY |
| | of H1E | | ADSVKGRFTISRDDSKNTAYLQMNNLKTEDTAVYYCVRHGNFGNSYLSFWAYWGQGTLVTVS |
| | | | SGGGGSGGGGSGGGGSELVVTQEPSLTVSPGGTVTLTCGSSTGAVTSGYYPNWVQQKPGQAP |
| | | | RGLIGGTKFLAPGTPARFSGSLLGGKAALTLSGVQPEDEAEYYCALWYSNRWVFGGGTKLTV |
| | | | L |
| 556 | scFv variant | ARTIFICIAL | EVQLLESGGGLVQPGGSLKLSCAASGFTFNRYAMNWVRQAPGKGLEWVARIRSKYNNYATYY |
| | of G4H | | ADSVKGRFTISRDDSKNTAYLQMNNLKTEDTAVYYCVRHGNFGNSYLSYFAYWGQGTLVTVS |
| | | | SGGGGSGGGGSGGGGSELVVTQEPSLTVSPGGTVTLTCGSSTGAVTSGYYPNWVQQKPGQAP |
| | | | RGLIGGTKFLAPGTPARFSGSLLGGKAALTLSGVQPEDEAEYYCALWYSNRWVFGGGTKLTV |
| | | | I |
| 557 | scFv variant | ARTIFICIAL | EVQLLESGGGLVQPGGSLKLSCAASGFTFNVYAMNWVRQAPGKGLEWVARIRSKYNNYATYY |
| | of A2J | | ADSVKKRFTISRDDSKNTAYLQMNNLKTEDTAVYYCVRHGNFGNSYLSWWAYWGQGTLVTVS |
| | | | SGGGGSGGGGSGGGGSELVVTQEPSLTVSPGGTVTLTCRSSTGAVTSGYYPNWVQQKPGQAP |
| | | | RGLIGATDMRPSGTPARFSGSLLGGKAALTLSGVQPEDEAEYYCALWYSNRWVFGGGTKLTV |
| | | | L |
| 558 | scFv variant | ARTIFICIAL | EVQLLESGGGLVQPGGSLKLSCAASGFTFNKYAMNWVRQAPGKGLEWVARIRSKYNNYATYY |
| | of E1L | | ADSVKSRFTISRDDSKNTAYLQMNNLKTEDTAVYYCVRHGNFGNSYTSYYAYWGQGTLVTVS |
| | | | SGGGGSGGGGSGGGGSELVVTQEPSLTVSPGGTVTLTCGSSTGAVTSGYYPNWVQQKPGQAP |
| | | | RGLIGGTKFLAPGTPARFSGSLLGGKAALTLSGVQPEDEAEYYCALWYSNRWVFGGGTKLTV |
| | | | I |
| 559 | scFv variant | ARTIFICIAL | EVQLLESGGGLVQPGGSLKLSCAASGFTFNGYAMNWVRQAPGKGLEWVARIRSKYNNYATYY |
| | of E2M | | ADSVKERFTISRDDSKNTAYLQMNNLKTEDTAVYYCVRHRNFGNSYLSWFAYWGQGTLVTVS |
| | | | SGGGGSGGGGSGGGGSELVVTQEPSLTVSPGGTVTLTCRSSTGAVTSGYYPNWVQQKPGQAP |
| | | | RGLIGATDMRPSGTPARFSGSLLGGKAALTLSGVQPEDEAEYYCALWYSNRWVFGGGTKLTV |
| | | | L |
| 560 | scFv variant | ARTIFICIAL | EVQLLESGGGLVQPGGSLKLSCAASGFTFNVYAMNWVRQAPGKGLEWVARIRSKYNNYATYY |
| | of F70 | | ADSVKKRFTISRDDSKNTAYLQMNNLKTEDTAVYYCVRHGNFGNSYISWWAYWGQGTLVTVS |
| | | | SGGGGSGGGGSGGGGSELVVTQEPSLTVSPGGTVTLTCGSSTGAVTSGYYPNWVQQKPGQAP |
| | | | RGLIGGTKFLAPGTPARFSGSLLGGKAALTLSGVQPEDEAEYYCALWYSNRWVFGGGTKLTV |
| | | | L |
| 561 | scFv variant | ARTIFICIAL | EVQLLESGGGLVQPGGSLKLSCAASGFTFNSYAMNWVRQAPGKGLEWVARIRSKYNNYATYY |
| | of F12Q | | ADSVKGRFTISRDDSKNTAYLQMNNLKTEDTAVYYCVRHGNFGNSYVSWWAYWGQGTLVTVS |
| | | | SGGGGSGGGGSGGGGSELVVTQEPSLTVSPGGTVTLTCGSSTGAVTSGNYPNWVQQKPGQAP |
| | | | RGLIGGTKFLAPGTPARFSGSLLGGKAALTLSGVQPEDEAEYYCVLWYSNRWVFGGGTKLTV |
| | | | L |
| 562 | scFv variant | ARTIFICIAL | EVQLLESGGGLVQPGGSLKLSCAASGFTFNKYAMNWVRQAPGKGLEWVARIRSKYNNYATYY |
| | of I2C | | ADSVKDRFTISRDDSKNTAYLQMNNLKTEDTAVYYCVRHGNFGNSYISYWAYWGQGTLVTVS |
| | | | SGGGGSGGGGSGGGGSELVVTQEPSLTVSPGGTVTLTCGSSTGAVTSGNYPNWVQQKPGQAP |
| | | | RGLIGGTKFLAPGTPARFSGSLLGGKAALTLSGVQPEDEAEYYCVLWYSNRWVFGGGTKLTV |
| | | | L |
| 563 | linker 2 | ARTIFICIAL | GGGGS |
| 564 | linker 3 | ARTIFICIAL | GGGGQ |
| 565 | linker 4 | ARTIFICIAL | SGGGGS |
| 566 | linker 5 | ARTIFICIAL | PGGGGS |
| 567 | linker 6 | ARTIFICIAL | PGGDGS |
| 568 | linker 7 | ARTIFICIAL | GGGGSGGGS |
| 569 | linker 8 = | ARTIFICIAL | GGGGSGGGGS |
| | (G4S) 2 | | |
| | linker | | |
| 570 | linker 9 = | ARTIFICIAL | GGGGSGGGGSGGGGS |
| | (G4S) 3 | | |
| | linker | | |
| 571 | (G4S) 4 | ARTIFICIAL | GGGGSGGGGSGGGGSGGGGS |
| | linker | | |
| 572 | (G4S) 5 | ARTIFICIAL | GGGGSGGGGSGGGGSGGGGSGGGGS |
| | linker | | |
| 573 | (G4S) 6 | ARTIFICIAL | GGGGSGGGGSGGGGSGGGGSGGGGSGGGGS |
| | linker | | |
| 574 | (G4S) 7 | ARTIFICIAL | GGGGSGGGGSGGGGSGSGGGGSGGGGSGGGGS |
| | linker | | |
| 575 | (G4S) 8 | ARTIFICIAL | GGGGSGGGGSGGGGSGGGGSGGGGSGGGGSGGGGSGGGGS |
| | linker | | |
| 576 | linear FcRn | ARTIFICIAL | QRFVTGHFGGLXPANG |
| | BP | | |
| 577 | linear FcRn | ARTIFICIAL | QRFVTGHFGGLYPANG |
| | BP-Y | | |
| 578 | linear FcRn | ARTIFICIAL | QRFVTGHFGGLHPANG |
| | BP-H | | |
| 579 | core FcRn | ARTIFICIAL | TGHFGGLHP |
| | BP-H | | |
| 580 | cyclic FcRn | ARTIFICIAL | QRFCTGHFGGLHPCNG |
| | BP-H | | |
| 581 | HALB | ARTIFICIAL | DAHKSEVAHRFKDLGEENFKALVLIAFAQYLQQCPFEDHVKLVNEVTEFAKTCVADESAENC |
| | | | DKSLHTLFGDKLCTVATLRETYGEMADCCAKQEPERNECFLQHKDDNPNLPRLVRPEVDVMC |
| | | | TAFHDNEETFLKKYLYEIARRHPYFYAPELLFFAKRYKAAFTECCQAADKAACLLPKLDELR |
| | | | DEGKASSAKQRLKCASLQKFGERAFKAWAVARLSQRFPKAEFAEVSKLVTDLTKVHTECCHG |
| | | | DLLECADDRADLAKYICENQDSISSKLKECCEKPLLEKSHCIAEVENDEMPADLPSLAADFV |
| | | | ESKDVCKNYAEAKDVFLGMFLYEYARRHPDYSVVLLLRLAKTYETTLEKCCAAADPHECYAK |
| | | | VFDEFKPLVEEPQNLIKQNCELFEQLGEYKFQNALLVRYTKKVPQVSTPTLVEVSRNLGKVG |
| | | | SKCCKHPEAKRMPCAEDYLSVVLNQLCVLHEKTPVSDRVTKCCTESLVNRRPCFSALEVDET |
| | | | YVPKEFNAETFTFHADICTLSEKERQIKKQTALVELVKHKPKATKEQLKAVMDDFAAFVEKC |
| | | | CKADDKETCFAEEGKKLVAASQAALGL |
| 582 | HALB | ARTIFICIAL | DAHKSEVAHRFKDLGEENFKALVLIAFAQYLQQCPFEDHVKLVNEVTEFAKTCVADESAENC |
| | variant 1 | | DKSLHTLFGDKLCTVATLRETYGEMADCCAKQEPERNECFLQHKDDNPNLPRLVRPEVDVMC |
| | | | TAFHDNEETFLKKYLYEIARRHPYFYAPELLFFAKRYKAAFTECCQAADKAACLLPKLDELR |
| | | | DEGKASSAKQRLKCASLQKFGERAFKAWAVARLSQRFPKAEFAEVSKLVTDLTKVHTECCHG |
| | | | DLLECADDRADLAKYICENQDSISSKLKECCEKPLLEKSHCIAEVENDEMPADLPSLAADFV |
| | | | ESKDVCKNYAEAKDVFLGMFLYEYARRHPDYSVVLLLRLAKTYETTLEKCCAAADPHECYAK |
| | | | VFDEFKPLVEEPQNLIKQNCELFEQLGEYKFQNALLVRYTKKVPQVSTPTLVEVSRNLGKVG |
| | | | SKCCKHPEAKRMPCAEDYLSVVLNQLCVLHEKTPVSDRVTKCCTESLVNRRPCFSALEVDET |
| | | | YVPKEFNAGTFTFHADICTLSEKERQIKKQTALVELVKHKPKATKEQLKAAMDDFAAFVEKC |
| | | | CKADDKETCFAEEGKKLVAASQAALGL |
| 583 | HALB | ARTIFICIAL | DAHKSEVAHRFKDLGEENFKALVLIAFAQYLQQCPFEDHVKLVNEVTEFAKTCVADESAENC |
| | variant 2 | | DKSLHTLFGDKLCTVATLRETYGEMADCCAKQEPERNECFLQHKDDNPNLPRLVRPEVDVMC |
| | | | TAFHDNEETFLKKYLYEIARRHPYFYAPELLFFAKRYKAAFTECCQAADKAACLLPKLDELR |
| | | | DEGKASSAKQRLKCASLQKFGERAFKAWAVARLSQRFPKAEFAEVSKLVTDLTKVHTECCHG |
| | | | DLLECADDRADLAKYICENQDSISSKLKECCEKPLLEKSHCIAEVENDEMPADLPSLAADFV |
| | | | ESKDVCKNYAEAKDVFLGMFLYEYARRHPDYSVVLLLRLAKTYETTLEKCCAAADPHECYAK |
| | | | VFDEFKPLVEEPQNLIKQNCELFEQLGEYKFQNALLVRYTKKVPQVSTPTLVEVSRNLGKVG |
| | | | SKCCKHPEAKRMPCAEDYLSVVLNQLCVLHEKTPVSDRVTKCCTESLVNRRPCFSALEVDET |
| | | | YVPKEFNAETFTFHADICTLSEKERQIKKQTALVELVKHKPKATKEQLKAVMDDFAAFVEKC |
| | | | CKADDKETCFAEEGPKLVAASQAALGL |
| 584 | HALB | ARTIFICIAL | DAHKSEVAHRFKDLGEENFKALVLIAFAQYLQQCPFEDHVKLVNEVTEFAKTCVADESAENC |
| | variant 3 | | DKSLHTLFGDKLCTVATLRETYGEMADCCAKQEPERNECFLQHKDDNPNLPRLVRPEVDVMC |
| | | | TAFHDNEETFLKKYLYEIARRHPYFYAPELLFFAKRYKAAFTECCQAADKAACLLPKLDELR |
| | | | DEGKASSAKQRLKCASLQKFGERAFKAWAVARLSQRFPKAEFAEVSKLVTDLTKVHTECCHG |
| | | | DLLECADDRADLAKYICENQDSISSKLKECCEKPLLEKSHCIAEVENDEMPADLPSLAADFV |
| | | | ESKDVCKNYAEAKDVFLGMFLYEYARRHPDYSVVLLLRLAKTYETTLEKCCAAADPHECYAK |
| | | | VFDEFKPLVEEPQNLIKQNCELFEQLGEYKFQNALLVRYTKKVPQVSTPTLVEVSRNLGKVG |
| | | | SKCCKHPEAKRMPCAEDYLSVVLNQLCVLHEKTPVSDRVTKCCTESLVNRRPCFSALDVDET |
| | | | YVPKEFNAETFTFHADICTLSEKERQIKKQTALVELVKHKPKATKEQLKAVMDDFAAFVEKC |
| | | | CKADDKETCFAEEGPHLVAASKAALGL |
| 585 | HALB | ARTIFICIAL | DAHKSEVAHRFKDLGEENFKALVLIAFAQYLQQCPFEDHVKLVNEVTEFAKTCVADESAENC |
| | variant 4 | | DKSLHTLFGDKLCTVATLRETYGEMADCCAKQEPERNECFLQHKDDNPNLPRLVRPEVDVMC |
| | | | TAFHDNEETFLKKYLYEIARRHPYFYAPELLFFAKRYKAAFTECCQAADKAACLLPKLDELR |
| | | | DEGKASSAKQRLKCASLQKFGERAFKAWAVARLSQRFPKAEFAEVSKLVTDLTKVHTECCHG |
| | | | DLLECADDRADLAKYICENQDSISSKLKECCEKPLLEKSHCIAEVENDEMPADLPSLAADFV |
| | | | ESKDVCKNYAEAKDVFLGMFLYEYARRHPDYSVVLLLRLAKTYETTLEKCCAAADPHECYAK |
| | | | VFDEFKPLVEEPQNLIKQNCELFEQLGEYKFQNALLVRYTKKVPQVSTPTLVEVSRNLGKVG |
| | | | SKCCKHPEAKRMPCAEDYLSVVLNQLCVLHEKTPVSDRVTKCCTESLVNRRPCFSALGVDET |
| | | | YVPKEFNAETFTFHADICTLSEKERQIKKQTALVELVKHKPKATKEQLKAVMDKFAAFVEKC |
| | | | CKADDKETCFAEEGPKLVAASQAALGL |
| 586 | HALB | ARTIFICIAL | DAHKSEVAHRFKDLGEENFKALVLIAFAQYLQQCPFEDHVKLVNEVTEFAKTCVADESAENC |
| | variant 5 | | DKSLHTLFGDKLCTVATLRETYGEMADCCAKQEPERNECFLQHKDDNPNLPRLVRPEVDVMC |
| | | | TAFHDNEETFLKKYLYEIARRHPYFYAPELLFFAKRYKAAFTECCQAADKAACLLPKLDELR |
| | | | DEGKASSAKQRLKCASLQKFGERAFKAWAVARLSQRFPKAEFAEVSKLVTDLTKVHTECCHG |
| | | | DLLECADDRADLAKYICENQDSISSKLKECCEKPLLEKSHCIAEVENDEMPADLPSLAADFV |
| | | | ESKDVCKNYAEAKDVFLGMFLYEYARRHPDYSVVLLLRLAKTYETTLEKCCAAADPHECYAK |
| | | | VFDEFKPLVEEPQNLIKQNCELFEQLGEYKFQNALLVRYTKKVPQVSTPTLVEVSRNLGKVG |
| | | | SKCCKHPEAKRMPCAEDYLSVVLNQLCVLHEKTPVSDRVTKCCTESLVNRRPCFSALDVDET |
| | | | YVPKEFNAETFTFHADICTLSEKERQIKKQTALVELVKHKPKATKEQLKAVMDKFAAFVEKC |
| | | | CKADDKETCFAEEGPKLVAASQAALGL |
| 587 | HALB | ARTIFICIAL | DAHKSEVAHRFKDLGEENFKALVLIAFAQYLQQCPFEDHVKLVNEVTEFAKTCVADESAENC |
| | variant 6 | | DKSLHTLFGDKLCTVATLRETYGEMADCCAKQEPERNECFLQHKDDNPNLPRLVRPEVDVMC |
| | | | TAFHDNEETFLKKYLYEIARRHPYFYAPELLFFAKRYKAAFTECCQAADKAACLLPKLDELR |
| | | | DEGKASSAKQRLKCASLQKFGERAFKAWAVARLSQRFPKAEFAEVSKLVTDLTKVHTECCHG |
| | | | DLLECADDRADLAKYICENQDSISSKLKECCEKPLLEKSHCIAEVENDEMPADLPSLAADFV |
| | | | ESKDVCKNYAEAKDVFLGMFLYEYARRHPDYSVVLLLRLAKTYETTLEKCCAAADPHECYAK |
| | | | VFDEFKPLVEEPQNLIKQNCELFEQLGEYKFQNALLVRYTKKVPQVSTPTLVEVSRNLGKVG |
| | | | SKCCKHPEAKRMPCAEDYLSVVLNQLCVLHEKTPVSDRVTKCCTESLVNRRPCFSALEVDET |
| | | | YVPKEFNAETFTFHADICTLSEKERQIKKQTALVELVKHKPKATKEQLKAVMDKFAAFVEKC |
| | | | CKADDKETCFAEEGPHLVAASQAALGL |
| 588 | HALB | ARTIFICIAL | DAHKSEVAHRFKDLGEENFKALVLIAFAQYLQQCPFEDHVKLVNEVTEFAKTCVADESAENC |
| | variant 7 | | DKSLHTLFGDKLCTVATLRETYGEMADCCAKQEPERNECFLQHKDDNPNLPRLVRPEVDVMC |
| | | | TAFHDNEETFLKKYLYEIARRHPYFYAPELLFFAKRYKAAFTECCQAADKAACLLPKLDELR |
| | | | DEGKASSAKQRLKCASLQKFGERAFKAWAVARLSQRFPKAEFAEVSKLVTDLTKVHTECCHG |
| | | | DLLECADDRADLAKYICENQDSISSKLKECCEKPLLEKSHCIAEVENDEMPADLPSLAADFV |
| | | | ESKDVCKNYAEAKDVFLGMFLYEYARRHPDYSVVLLLRLAKTYETTLEKCCAAADPHECYAK |
| | | | VFDEFKPLVEEPQNLIKQNCELFEQLGEYKFQNALLVRYTKKVPQVSTPTLVEVSRNLGKVG |
| | | | SKCCKHPEAKRMPCAEDYLSVVLNQLCVLHEKTPVSDRVTKCCTESLVNRRPCFSALEVDET |
| | | | YVPKEFNAETFTFHADICTLSEKERQIKKQTALVELVKHKPKATKEQLKAVMDDFAAFVEKC |
| | | | CKADDKETCFAEEGPHLVAASKAALGL |
| 589 | HALB | ARTIFICIAL | DAHKSEVAHRFKDLGEENFKALVLIAFAQYLQQCPFEDHVKLVNEVTEFAKTCVADESAENC |
| | variant 8 | | DKSLHTLFGDKLCTVATLRETYGEMADCCAKQEPERNECFLQHKDDNPNLPRLVRPEVDVMC |
| | | | TAFHDNEETFLKKYLYEIARRHPYFYAPELLFFAKRYKAAFTECCQAADKAACLLPKLDELR |
| | | | DEGKASSAKQRLKCASLQKFGERAFKAWAVARLSQRFPKAEFAEVSKLVTDLTKVHTECCHG |
| | | | DLLECADDRADLAKYICENQDSISSKLKECCEKPLLEKSHCIAEVENDEMPADLPSLAADFV |
| | | | ESKDVCKNYAEAKDVFLGMFLYEYARRHPDYSVVLLLRLAKTYETTLEKCCAAADPHECYAK |
| | | | VFDEFKPLVEEPQNLIKQNCELFEQLGEYKFQNALLVRYTKKVPQVSTPTLVEVSRNLGKVG |
| | | | SKCCKHPEAKRMPCAEDYLSVVLNQLCVLHEKTPVSDRVTKCCTESLVNRRPCFSALEVDET |
| | | | YVPKEFNAETFTFHADICTLSEKERQIKKQTALVELVKHKPKATKEQLKAVMDKFAAFVEKC |
| | | | CKADDKETCFAEEGPKLVAASKAALGL |
| 590 | HALB | ARTIFICIAL | DAHKSEVAHRFKDLGEENFKALVLIAFAQYLQQCPFEDHVKLVNEVTEFAKTCVADESAENC |
| | variant 9 | | DKSLHTLFGDKLCTVATLRETYGEMADCCAKQEPERNECFLQHKDDNPNLPRLVRPEVDVMC |
| | | | TAFHDNEETFLKKYLYEIARRHPYFYAPELLFFAKRYKAAFTECCQAADKAACLLPKLDELR |
| | | | DEGKASSAKQRLKCASLQKFGERAFKAWAVARLSQRFPKAEFAEVSKLVTDLTKVHTECCHG |
| | | | DLLECADDRADLAKYICENQDSISSKLKECCEKPLLEKSHCIAEVENDEMPADLPSLAADFV |
| | | | ESKDVCKNYAEAKDVFLGMFLYEYARRHPDYSVVLLLRLAKTYETTLEKCCAAADPHECYAK |
| | | | VFDEFKPLVEEPQNLIKQNCELFEQLGEYKFQNALLVRYTKKVPQVSTPTLVEVSRNLGKVG |
| | | | SKCCKHPEAKRMPCAEDYLSVVLNQLCVLHEKTPVSDRVTKCCTESLVNRRPCFSALDVDET |
| | | | YVPKEFNAETFTFHADICTLSEKERQIKKQTALVELVKHKPKATKEQLKAVMDDFAAFVEKC |
| | | | CKADDKETCFAEEGPKLVAASKAALGL |
| 591 | HALB | ARTIFICIAL | DAHKSEVAHRFKDLGEENFKALVLIAFAQYLQQSPFEDHVKLVNEVTEFAKTCVADESAENC |
| | variant 10 | | DKSLHTLFGDKLCTVATLRETYGEMADCCAKQEPERNECFLQHKDDNPNLPRLVRPEVDVMC |
| | | | TAFHDNEETFLKKYLYEIARRHPYFYAPELLFFAKRYKAAFTECCQAADKAACLLPKLDELR |
| | | | DEGKASSAKQRLKCASLQKFGERAFKAWAVARLSQRFPKAEFAEVSKLVTDLTKVHTECCHG |
| | | | DLLECADDRADLAKYICENQDSISSKLKECCEKPLLEKSHCIAEVENDEMPADLPSLAADFV |
| | | | ESKDVCKNYAEAKDVFLGMFLYEYARRHPDYSVVLLLRLAKTYETTLEKCCAAADPHECYAK |
| | | | VFDEFKPLVEEPQNLIKQNCELFEQLGEYKFQNALLVRYTKKVPQVSTPTLVEVSRNLGKVG |
| | | | SKCCKHPEAKRMPCAEDYLSVVLNQLCVLHEKTPVSDRVTKCCTESLVNRRPCFSALEVDET |
| | | | YVPKEFNAETFTFHADICTLSEKERQIKKQTALVELVKHKPKATKEQLKAVMDDFAAFVEKC |
| | | | CKADDKETCFAEEGKKLVAASQAALGL |
| 592 | HALB | ARTIFICIAL | DAHKSEVAHRFKDLGEENFKALVLIAFAQYLQQSPFEDHVKLVNEVTEFAKTCVADESAENC |
| | variant 11 | | DKSLHTLFGDKLCTVATLRETYGEMADCCAKQEPERNECFLQHKDDNPNLPRLVRPEVDVMC |
| | | | TAFHDNEETFLKKYLYEIARRHPYFYAPELLFFAKRYKAAFTECCQAADKAACLLPKLDELR |
| | | | DEGKASSAKQRLKCASLQKFGERAFKAWAVARLSQRFPKAEFAEVSKLVTDLTKVHTECCHG |
| | | | DLLECADDRADLAKYICENQDSISSKLKECCEKPLLEKSHCIAEVENDEMPADLPSLAADFV |
| | | | ESKDVCKNYAEAKDVFLGMFLYEYARRHPDYSVVLLLRLAKTYETTLEKCCAAADPHECYAK |
| | | | VFDEFKPLVEEPQNLIKQNCELFEQLGEYKFQNALLVRYTKKVPQVSTPTLVEVSRNLGKVG |
| | | | SKCCKHPEAKRMPCAEDYLSVVLNQLCVLHEKTPVSDRVTKCCTESLVNRRPCFSALEVDET |
| | | | YVPKEFNAGTFTFHADICTLSEKERQIKKQTALVELVKHKPKATKEQLKAAMDDFAAFVEKC |
| | | | CKADDKETCFAEEGKKLVAASQAALGL |
| 593 | HALB | ARTIFICIAL | DAHKSEVAHRFKDLGEENFKALVLIAFAQYLQQSPFEDHVKLVNEVTEFAKTCVADESAENC |
| | variant 12 | | DKSLHTLFGDKLCTVATLRETYGEMADCCAKQEPERNECFLQHKDDNPNLPRLVRPEVDVMC |
| | | | TAFHDNEETFLKKYLYEIARRHPYFYAPELLFFAKRYKAAFTECCQAADKAACLLPKLDELR |
| | | | DEGKASSAKQRLKCASLQKFGERAFKAWAVARLSQRFPKAEFAEVSKLVTDLTKVHTECCHG |
| | | | DLLECADDRADLAKYICENQDSISSKLKECCEKPLLEKSHCIAEVENDEMPADLPSLAADFV |
| | | | ESKDVCKNYAEAKDVFLGMFLYEYARRHPDYSVVLLLRLAKTYETTLEKCCAAADPHECYAK |
| | | | VFDEFKPLVEEPQNLIKQNCELFEQLGEYKFQNALLVRYTKKVPQVSTPTLVEVSRNLGKVG |
| | | | SKCCKHPEAKRMPCAEDYLSVVLNQLCVLHEKTPVSDRVTKCCTESLVNRRPCFSALEVDET |
| | | | YVPKEFNAETFTFHADICTLSEKERQIKKQTALVELVKHKPKATKEQLKAVMDDFAAFVEKC |
| | | | CKADDKETCFAEEGPKLVAASQAALGL |
| 594 | HALB | ARTIFICIAL | DAHKSEVAHRFKDLGEENFKALVLIAFAQYLQQSPFEDHVKLVNEVTEFAKTCVADESAENC |
| | variant 13 | | DKSLHTLFGDKLCTVATLRETYGEMADCCAKQEPERNECFLQHKDDNPNLPRLVRPEVDVMC |
| | | | TAFHDNEETFLKKYLYEIARRHPYFYAPELLFFAKRYKAAFTECCQAADKAACLLPKLDELR |
| | | | DEGKASSAKQRLKCASLQKFGERAFKAWAVARLSQRFPKAEFAEVSKLVTDLTKVHTECCHG |
| | | | DLLECADDRADLAKYICENQDSISSKLKECCEKPLLEKSHCIAEVENDEMPADLPSLAADFV |
| | | | ESKDVCKNYAEAKDVFLGMFLYEYARRHPDYSVVLLLRLAKTYETTLEKCCAAADPHECYAK |
| | | | VFDEFKPLVEEPQNLIKQNCELFEQLGEYKFQNALLVRYTKKVPQVSTPTLVEVSRNLGKVG |
| | | | SKCCKHPEAKRMPCAEDYLSVVLNQLCVLHEKTPVSDRVTKCCTESLVNRRPCFSALDVDET |
| | | | YVPKEFNAETFTFHADICTLSEKERQIKKQTALVELVKHKPKATKEQLKAVMDDFAAFVEKC |
| | | | CKADDKETCFAEEGPHLVAASKAALGL |
| 595 | HALB | ARTIFICIAL | DAHKSEVAHRFKDLGEENFKALVLIAFAQYLQQSPFEDHVKLVNEVTEFAKTCVADESAENC |
| | variant 14 | | DKSLHTLFGDKLCTVATLRETYGEMADCCAKQEPERNECFLQHKDDNPNLPRLVRPEVDVMC |
| | | | TAFHDNEETFLKKYLYEIARRHPYFYAPELLFFAKRYKAAFTECCQAADKAACLLPKLDELR |
| | | | DEGKASSAKQRLKCASLQKFGERAFKAWAVARLSQRFPKAEFAEVSKLVTDLTKVHTECCHG |
| | | | DLLECADDRADLAKYICENQDSISSKLKECCEKPLLEKSHCIAEVENDEMPADLPSLAADFV |
| | | | ESKDVCKNYAEAKDVFLGMFLYEYARRHPDYSVVLLLRLAKTYETTLEKCCAAADPHECYAK |
| | | | VFDEFKPLVEEPQNLIKQNCELFEQLGEYKFQNALLVRYTKKVPQVSTPTLVEVSRNLGKVG |
| | | | SKCCKHPEAKRMPCAEDYLSVVLNQLCVLHEKTPVSDRVTKCCTESLVNRRPCFSALGVDET |
| | | | YVPKEFNAETFTFHADICTLSEKERQIKKQTALVELVKHKPKATKEQLKAVMDKFAAFVEKC |
| | | | CKADDKETCFAEEGPKLVAASQAALGL |
| 596 | HALB | ARTIFICIAL | DAHKSEVAHRFKDLGEENFKALVLIAFAQYLQQSPFEDHVKLVNEVTEFAKTCVADESAENC |
| | variant 15 | | DKSLHTLFGDKLCTVATLRETYGEMADCCAKQEPERNECFLQHKDDNPNLPRLVRPEVDVMC |
| | | | TAFHDNEETFLKKYLYEIARRHPYFYAPELLFFAKRYKAAFTECCQAADKAACLLPKLDELR |
| | | | DEGKASSAKQRLKCASLQKFGERAFKAWAVARLSQRFPKAEFAEVSKLVTDLTKVHTECCHG |
| | | | DLLECADDRADLAKYICENQDSISSKLKECCEKPLLEKSHCIAEVENDEMPADLPSLAADFV |
| | | | ESKDVCKNYAEAKDVFLGMFLYEYARRHPDYSVVLLLRLAKTYETTLEKCCAAADPHECYAK |
| | | | VFDEFKPLVEEPQNLIKQNCELFEQLGEYKFQNALLVRYTKKVPQVSTPTLVEVSRNLGKVG |
| | | | SKCCKHPEAKRMPCAEDYLSVVLNQLCVLHEKTPVSDRVTKCCTESLVNRRPCFSALDVDET |
| | | | YVPKEFNAETFTFHADICTLSEKERQIKKQTALVELVKHKPKATKEQLKAVMDKFAAFVEKC |
| | | | CKADDKETCFAEEGPKLVAASQAALGL |
| 597 | HALB | ARTIFICIAL | DAHKSEVAHRFKDLGEENFKALVLIAFAQYLQQSPFEDHVKLVNEVTEFAKTCVADESAENC |
| | variant 16 | | DKSLHTLFGDKLCTVATLRETYGEMADCCAKQEPERNECFLQHKDDNPNLPRLVRPEVDVMC |
| | | | TAFHDNEETFLKKYLYEIARRHPYFYAPELLFFAKRYKAAFTECCQAADKAACLLPKLDELR |
| | | | DEGKASSAKQRLKCASLQKFGERAFKAWAVARLSQRFPKAEFAEVSKLVTDLTKVHTECCHG |
| | | | DLLECADDRADLAKYICENQDSISSKLKECCEKPLLEKSHCIAEVENDEMPADLPSLAADFV |
| | | | ESKDVCKNYAEAKDVFLGMFLYEYARRHPDYSVVLLLRLAKTYETTLEKCCAAADPHECYAK |
| | | | VFDEFKPLVEEPQNLIKQNCELFEQLGEYKFQNALLVRYTKKVPQVSTPTLVEVSRNLGKVG |
| | | | SKCCKHPEAKRMPCAEDYLSVVLNQLCVLHEKTPVSDRVTKCCTESLVNRRPCFSALEVDET |
| | | | YVPKEFNAETFTFHADICTLSEKERQIKKQTALVELVKHKPKATKEQLKAVMDKFAAFVEKC |
| | | | CKADDKETCFAEEGPHLVAASQAALGL |
| 598 | HALB | ARTIFICIAL | DAHKSEVAHRFKDLGEENFKALVLIAFAQYLQQSPFEDHVKLVNEVTEFAKTCVADESAENC |
| | variant 17 | | DKSLHTLFGDKLCTVATLRETYGEMADCCAKQEPERNECFLQHKDDNPNLPRLVRPEVDVMC |
| | | | TAFHDNEETFLKKYLYEIARRHPYFYAPELLFFAKRYKAAFTECCQAADKAACLLPKLDELR |
| | | | DEGKASSAKQRLKCASLQKFGERAFKAWAVARLSQRFPKAEFAEVSKLVTDLTKVHTECCHG |
| | | | DLLECADDRADLAKYICENQDSISSKLKECCEKPLLEKSHCIAEVENDEMPADLPSLAADFV |
| | | | ESKDVCKNYAEAKDVFLGMFLYEYARRHPDYSVVLLLRLAKTYETTLEKCCAAADPHECYAK |
| | | | VFDEFKPLVEEPQNLIKQNCELFEQLGEYKFQNALLVRYTKKVPQVSTPTLVEVSRNLGKVG |
| | | | SKCCKHPEAKRMPCAEDYLSVVLNQLCVLHEKTPVSDRVTKCCTESLVNRRPCFSALEVDET |
| | | | YVPKEFNAETFTFHADICTLSEKERQIKKQTALVELVKHKPKATKEQLKAVMDDFAAFVEKC |
| | | | CKADDKETCFAEEGPHLVAASKAALGL |
| 599 | HALB | ARTIFICIAL | DAHKSEVAHRFKDLGEENFKALVLIAFAQYLQQSPFEDHVKLVNEVTEFAKTCVADESAENC |
| | variant 18 | | DKSLHTLFGDKLCTVATLRETYGEMADCCAKQEPERNECFLQHKDDNPNLPRLVRPEVDVMC |
| | | | TAFHDNEETFLKKYLYEIARRHPYFYAPELLFFAKRYKAAFTECCQAADKAACLLPKLDELR |
| | | | DEGKASSAKQRLKCASLQKFGERAFKAWAVARLSQRFPKAEFAEVSKLVTDLTKVHTECCHG |
| | | | DLLECADDRADLAKYICENQDSISSKLKECCEKPLLEKSHCIAEVENDEMPADLPSLAADFV |
| | | | ESKDVCKNYAEAKDVFLGMFLYEYARRHPDYSVVLLLRLAKTYETTLEKCCAAADPHECYAK |
| | | | VFDEFKPLVEEPQNLIKQNCELFEQLGEYKFQNALLVRYTKKVPQVSTPTLVEVSRNLGKVG |
| | | | SKCCKHPEAKRMPCAEDYLSVVLNQLCVLHEKTPVSDRVTKCCTESLVNRRPCFSALEVDET |
| | | | YVPKEFNAETFTFHADICTLSEKERQIKKQTALVELVKHKPKATKEQLKAVMDKFAAFVEKC |
| | | | CKADDKETCFAEEGPKLVAASKAALGL |
| 600 | HALB | ARTIFICIAL | DAHKSEVAHRFKDLGEENFKALVLIAFAQYLQQSPFEDHVKLVNEVTEFAKTCVADESAENC |
| | variant 19 | | DKSLHTLFGDKLCTVATLRETYGEMADCCAKQEPERNECFLQHKDDNPNLPRLVRPEVDVMC |
| | | | TAFHDNEETFLKKYLYEIARRHPYFYAPELLFFAKRYKAAFTECCQAADKAACLLPKLDELR |
| | | | DEGKASSAKQRLKCASLQKFGERAFKAWAVARLSQRFPKAEFAEVSKLVTDLTKVHTECCHG |
| | | | DLLECADDRADLAKYICENQDSISSKLKECCEKPLLEKSHCIAEVENDEMPADLPSLAADFV |
| | | | ESKDVCKNYAEAKDVFLGMFLYEYARRHPDYSVVLLLRLAKTYETTLEKCCAAADPHECYAK |
| | | | VFDEFKPLVEEPQNLIKQNCELFEQLGEYKFQNALLVRYTKKVPQVSTPTLVEVSRNLGKVG |
| | | | SKCCKHPEAKRMPCAEDYLSVVLNQLCVLHEKTPVSDRVTKCCTESLVNRRPCFSALDVDET |
| | | | YVPKEFNAETFTFHADICTLSEKERQIKKQTALVELVKHKPKATKEQLKAVMDDFAAFVEKC |
| | | | CKADDKETCFAEEGPKLVAASKAALGL |
| 601 | HALB | ARTIFICIAL | DAHKSEVAHRFKDLGEENFKALVLIAFAQYLQQAPFEDHVKLVNEVTEFAKTCVADESAENC |
| | variant 20 | | DKSLHTLFGDKLCTVATLRETYGEMADCCAKQEPERNECFLQHKDDNPNLPRLVRPEVDVMC |
| | | | TAFHDNEETFLKKYLYEIARRHPYFYAPELLFFAKRYKAAFTECCQAADKAACLLPKLDELR |
| | | | DEGKASSAKQRLKCASLQKFGERAFKAWAVARLSQRFPKAEFAEVSKLVTDLTKVHTECCHG |
| | | | DLLECADDRADLAKYICENQDSISSKLKECCEKPLLEKSHCIAEVENDEMPADLPSLAADFV |
| | | | ESKDVCKNYAEAKDVFLGMFLYEYARRHPDYSVVLLLRLAKTYETTLEKCCAAADPHECYAK |
| | | | VFDEFKPLVEEPQNLIKQNCELFEQLGEYKFQNALLVRYTKKVPQVSTPTLVEVSRNLGKVG |
| | | | SKCCKHPEAKRMPCAEDYLSVVLNQLCVLHEKTPVSDRVTKCCTESLVNRRPCFSALEVDET |
| | | | YVPKEFNAETFTFHADICTLSEKERQIKKQTALVELVKHKPKATKEQLKAVMDDFAAFVEKC |
| | | | CKADDKETCFAEEGKKLVAASQAALGL |
| 602 | HALB | ARTIFICIAL | DAHKSEVAHRFKDLGEENFKALVLIAFAQYLQQAPFEDHVKLVNEVTEFAKTCVADESAENC |
| | variant 21 | | DKSLHTLFGDKLCTVATLRETYGEMADCCAKQEPERNECFLQHKDDNPNLPRLVRPEVDVMC |
| | | | TAFHDNEETFLKKYLYEIARRHPYFYAPELLFFAKRYKAAFTECCQAADKAACLLPKLDELR |
| | | | DEGKASSAKQRLKCASLQKFGERAFKAWAVARLSQRFPKAEFAEVSKLVTDLTKVHTECCHG |
| | | | DLLECADDRADLAKYICENQDSISSKLKECCEKPLLEKSHCIAEVENDEMPADLPSLAADFV |
| | | | ESKDVCKNYAEAKDVFLGMFLYEYARRHPDYSVVLLLRLAKTYETTLEKCCAAADPHECYAK |
| | | | VFDEFKPLVEEPQNLIKQNCELFEQLGEYKFQNALLVRYTKKVPQVSTPTLVEVSRNLGKVG |
| | | | SKCCKHPEAKRMPCAEDYLSVVLNQLCVLHEKTPVSDRVTKCCTESLVNRRPCFSALEVDET |
| | | | YVPKEFNAGTFTFHADICTLSEKERQIKKQTALVELVKHKPKATKEQLKAAMDDFAAFVEKC |
| | | | CKADDKETCFAEEGKKLVAASQAALGL |
| 603 | HALB | ARTIFICIAL | DAHKSEVAHRFKDLGEENFKALVLIAFAQYLQQAPFEDHVKLVNEVTEFAKTCVADESAENC |
| | variant 22 | | DKSLHTLFGDKLCTVATLRETYGEMADCCAKQEPERNECFLQHKDDNPNLPRLVRPEVDVMC |
| | | | TAFHDNEETFLKKYLYEIARRHPYFYAPELLFFAKRYKAAFTECCQAADKAACLLPKLDELR |
| | | | DEGKASSAKQRLKCASLQKFGERAFKAWAVARLSQRFPKAEFAEVSKLVTDLTKVHTECCHG |
| | | | DLLECADDRADLAKYICENQDSISSKLKECCEKPLLEKSHCIAEVENDEMPADLPSLAADFV |
| | | | ESKDVCKNYAEAKDVFLGMFLYEYARRHPDYSVVLLLRLAKTYETTLEKCCAAADPHECYAK |
| | | | VFDEFKPLVEEPQNLIKQNCELFEQLGEYKFQNALLVRYTKKVPQVSTPTLVEVSRNLGKVG |
| | | | SKCCKHPEAKRMPCAEDYLSVVLNQLCVLHEKTPVSDRVTKCCTESLVNRRPCFSALEVDET |
| | | | YVPKEFNAETFTFHADICTLSEKERQIKKQTALVELVKHKPKATKEQLKAVMDDFAAFVEKC |
| | | | CKADDKETCFAEEGPKLVAASQAALGL |
| 604 | HALB | ARTIFICIAL | DAHKSEVAHRFKDLGEENFKALVLIAFAQYLQQAPFEDHVKLVNEVTEFAKTCVADESAENC |
| | variant 23 | | DKSLHTLFGDKLCTVATLRETYGEMADCCAKQEPERNECFLQHKDDNPNLPRLVRPEVDVMC |
| | | | TAFHDNEETFLKKYLYEIARRHPYFYAPELLFFAKRYKAAFTECCQAADKAACLLPKLDELR |
| | | | DEGKASSAKQRLKCASLQKFGERAFKAWAVARLSQRFPKAEFAEVSKLVTDLTKVHTECCHG |
| | | | DLLECADDRADLAKYICENQDSISSKLKECCEKPLLEKSHCIAEVENDEMPADLPSLAADFV |
| | | | ESKDVCKNYAEAKDVFLGMFLYEYARRHPDYSVVLLLRLAKTYETTLEKCCAAADPHECYAK |
| | | | VFDEFKPLVEEPQNLIKQNCELFEQLGEYKFQNALLVRYTKKVPQVSTPTLVEVSRNLGKVG |
| | | | SKCCKHPEAKRMPCAEDYLSVVLNQLCVLHEKTPVSDRVTKCCTESLVNRRPCFSALDVDET |
| | | | YVPKEFNAETFTFHADICTLSEKERQIKKQTALVELVKHKPKATKEQLKAVMDDFAAFVEKC |
| | | | CKADDKETCFAEEGPHLVAASKAALGL |
| 605 | HALB | ARTIFICIAL | DAHKSEVAHRFKDLGEENFKALVLIAFAQYLQQAPFEDHVKLVNEVTEFAKTCVADESAENC |
| | variant 24 | | DKSLHTLFGDKLCTVATLRETYGEMADCCAKQEPERNECFLQHKDDNPNLPRLVRPEVDVMC |
| | | | TAFHDNEETFLKKYLYEIARRHPYFYAPELLFFAKRYKAAFTECCQAADKAACLLPKLDELR |
| | | | DEGKASSAKQRLKCASLQKFGERAFKAWAVARLSQRFPKAEFAEVSKLVTDLTKVHTECCHG |
| | | | DLLECADDRADLAKYICENQDSISSKLKECCEKPLLEKSHCIAEVENDEMPADLPSLAADFV |
| | | | ESKDVCKNYAEAKDVFLGMFLYEYARRHPDYSVVLLLRLAKTYETTLEKCCAAADPHECYAK |
| | | | VFDEFKPLVEEPQNLIKQNCELFEQLGEYKFQNALLVRYTKKVPQVSTPTLVEVSRNLGKVG |
| | | | SKCCKHPEAKRMPCAEDYLSVVLNQLCVLHEKTPVSDRVTKCCTESLVNRRPCFSALGVDET |
| | | | YVPKEFNAETFTFHADICTLSEKERQIKKQTALVELVKHKPKATKEQLKAVMDKFAAFVEKC |
| | | | CKADDKETCFAEEGPKLVAASQAALGL |
| 606 | HALB | ARTIFICIAL | DAHKSEVAHRFKDLGEENFKALVLIAFAQYLQQAPFEDHVKLVNEVTEFAKTCVADESAENC |
| | variant 25 | | DKSLHTLFGDKLCTVATLRETYGEMADCCAKQEPERNECFLQHKDDNPNLPRLVRPEVDVMC |
| | | | TAFHDNEETFLKKYLYEIARRHPYFYAPELLFFAKRYKAAFTECCQAADKAACLLPKLDELR |
| | | | DEGKASSAKQRLKCASLQKFGERAFKAWAVARLSQRFPKAEFAEVSKLVTDLTKVHTECCHG |
| | | | DLLECADDRADLAKYICENQDSISSKLKECCEKPLLEKSHCIAEVENDEMPADLPSLAADFV |
| | | | ESKDVCKNYAEAKDVFLGMFLYEYARRHPDYSVVLLLRLAKTYETTLEKCCAAADPHECYAK |
| | | | VFDEFKPLVEEPQNLIKQNCELFEQLGEYKFQNALLVRYTKKVPQVSTPTLVEVSRNLGKVG |
| | | | SKCCKHPEAKRMPCAEDYLSVVLNQLCVLHEKTPVSDRVTKCCTESLVNRRPCFSALDVDET |
| | | | YVPKEFNAETFTFHADICTLSEKERQIKKQTALVELVKHKPKATKEQLKAVMDKFAAFVEKC |
| | | | CKADDKETCFAEEGPKLVAASQAALGL |
| 607 | HALB | ARTIFICIAL | DAHKSEVAHRFKDLGEENFKALVLIAFAQYLQQAPFEDHVKLVNEVTEFAKTCVADESAENC |
| | variant 26 | | DKSLHTLFGDKLCTVATLRETYGEMADCCAKQEPERNECFLQHKDDNPNLPRLVRPEVDVMC |
| | | | TAFHDNEETFLKKYLYEIARRHPYFYAPELLFFAKRYKAAFTECCQAADKAACLLPKLDELR |
| | | | DEGKASSAKQRLKCASLQKFGERAFKAWAVARLSQRFPKAEFAEVSKLVTDLTKVHTECCHG |
| | | | DLLECADDRADLAKYICENQDSISSKLKECCEKPLLEKSHCIAEVENDEMPADLPSLAADFV |
| | | | ESKDVCKNYAEAKDVFLGMFLYEYARRHPDYSVVLLLRLAKTYETTLEKCCAAADPHECYAK |
| | | | VFDEFKPLVEEPQNLIKQNCELFEQLGEYKFQNALLVRYTKKVPQVSTPTLVEVSRNLGKVG |
| | | | SKCCKHPEAKRMPCAEDYLSVVLNQLCVLHEKTPVSDRVTKCCTESLVNRRPCFSALEVDET |
| | | | YVPKEFNAETFTFHADICTLSEKERQIKKQTALVELVKHKPKATKEQLKAVMDKFAAFVEKC |
| | | | CKADDKETCFAEEGPHLVAASQAALGL |
| 608 | HALB | ARTIFICIAL | DAHKSEVAHRFKDLGEENFKALVLIAFAQYLQQAPFEDHVKLVNEVTEFAKTCVADESAENC |
| | variant 27 | | DKSLHTLFGDKLCTVATLRETYGEMADCCAKQEPERNECFLQHKDDNPNLPRLVRPEVDVMC |
| | | | TAFHDNEETFLKKYLYEIARRHPYFYAPELLFFAKRYKAAFTECCQAADKAACLLPKLDELR |
| | | | DEGKASSAKQRLKCASLQKFGERAFKAWAVARLSQRFPKAEFAEVSKLVTDLTKVHTECCHG |
| | | | DLLECADDRADLAKYICENQDSISSKLKECCEKPLLEKSHCIAEVENDEMPADLPSLAADFV |
| | | | ESKDVCKNYAEAKDVFLGMFLYEYARRHPDYSVVLLLRLAKTYETTLEKCCAAADPHECYAK |
| | | | VFDEFKPLVEEPQNLIKQNCELFEQLGEYKFQNALLVRYTKKVPQVSTPTLVEVSRNLGKVG |
| | | | SKCCKHPEAKRMPCAEDYLSVVLNQLCVLHEKTPVSDRVTKCCTESLVNRRPCFSALEVDET |
| | | | YVPKEFNAETFTFHADICTLSEKERQIKKQTALVELVKHKPKATKEQLKAVMDDFAAFVEKC |
| | | | CKADDKETCFAEEGPHLVAASKAALGL |
| 609 | HALB | ARTIFICIAL | DAHKSEVAHRFKDLGEENFKALVLIAFAQYLQQAPFEDHVKLVNEVTEFAKTCVADESAENC |
| | variant 28 | | DKSLHTLFGDKLCTVATLRETYGEMADCCAKQEPERNECFLQHKDDNPNLPRLVRPEVDVMC |
| | | | TAFHDNEETFLKKYLYEIARRHPYFYAPELLFFAKRYKAAFTECCQAADKAACLLPKLDELR |
| | | | DEGKASSAKQRLKCASLQKFGERAFKAWAVARLSQRFPKAEFAEVSKLVTDLTKVHTECCHG |
| | | | DLLECADDRADLAKYICENQDSISSKLKECCEKPLLEKSHCIAEVENDEMPADLPSLAADFV |
| | | | ESKDVCKNYAEAKDVFLGMFLYEYARRHPDYSVVLLLRLAKTYETTLEKCCAAADPHECYAK |
| | | | VFDEFKPLVEEPQNLIKQNCELFEQLGEYKFQNALLVRYTKKVPQVSTPTLVEVSRNLGKVG |
| | | | SKCCKHPEAKRMPCAEDYLSVVLNQLCVLHEKTPVSDRVTKCCTESLVNRRPCFSALEVDET |
| | | | YVPKEFNAETFTFHADICTLSEKERQIKKQTALVELVKHKPKATKEQLKAVMDKFAAFVEKC |
| | | | CKADDKETCFAEEGPKLVAASKAALGL |
| 610 | HALB | ARTIFICIAL | DAHKSEVAHRFKDLGEENFKALVLIAFAQYLQQAPFEDHVKLVNEVTEFAKTCVADESAENC |
| | variant 29 | | DKSLHTLFGDKLCTVATLRETYGEMADCCAKQEPERNECFLQHKDDNPNLPRLVRPEVDVMC |
| | | | TAFHDNEETFLKKYLYEIARRHPYFYAPELLFFAKRYKAAFTECCQAADKAACLLPKLDELR |
| | | | DEGKASSAKQRLKCASLQKFGERAFKAWAVARLSQRFPKAEFAEVSKLVTDLTKVHTECCHG |
| | | | DLLECADDRADLAKYICENQDSISSKLKECCEKPLLEKSHCIAEVENDEMPADLPSLAADFV |
| | | | ESKDVCKNYAEAKDVFLGMFLYEYARRHPDYSVVLLLRLAKTYETTLEKCCAAADPHECYAK |
| | | | VFDEFKPLVEEPQNLIKQNCELFEQLGEYKFQNALLVRYTKKVPQVSTPTLVEVSRNLGKVG |
| | | | SKCCKHPEAKRMPCAEDYLSVVLNQLCVLHEKTPVSDRVTKCCTESLVNRRPCFSALDVDET |
| | | | YVPKEFNAETFTFHADICTLSEKERQIKKQTALVELVKHKPKATKEQLKAVMDDFAAFVEKC |
| | | | CKADDKETCFAEEGPKLVAASKAALGL |
| 611 | Cross body 1 | ARTIFICIAL | ASTKGPSVFPLAPSSKSTSGGTAALGCLVKDYFPEPVTVSWNSGALTSGVHTFPAVLQSSGL |
| | HC | | YSLSSVVTVPSSSLGTQTYICNVNHKPSNTKVDKKVEPKSCDKTHTCPPCPAPELLGGPSVF |
| | | | LFPPKPKDTLMISRTPEVTCVVVDVSHEDPEVKFNWYVDGVEVHNAKTKPCEEQYGSTYRCV |
| | | | SVLTVLHQDWLNGKEYKCKVSNKALPAPIEKTISKAKGQPREPQVYTLPPSREEMTKNQVSL |
| | | | TCLVKGFYPSDIAVEWESNGQPENNYDTTPPVLDSDGSFFLYSDLTVDKSRWQQGNVFSCSV |
| | | | MHEALHNHYTQKSLSLSPGK |
| 612 | Cross body 1 | ARTIFICIAL | GQPKAAPSVTLFPPSSEELQANKATLVCLISDFYPGAVTVAWKADSSPVKAGVETTTPSKQS |
| | LC | | NNKYAASSYLSLTPEQWKSHRSYSCQVTHEGSTVEKTVAPTECSDKTHTCPPCPAPELLGGP |
| | | | SVFLFPPKPKDTLMISRTPEVTCVVVDVSHEDPEVKFNWYVDGVEVHNAKTKPCEEQYGSTY |
| | | | RCVSVLTVLHQDWLNGKEYKCKVSNKALPAPIEKTISKAKGQPREPQVYTLPPSRKEMTKNQ |
| | | | VSLTCLVKGFYPSDIAVEWESNGQPENNYKTTPPVLKSDGSFFLYSKLTVDKSRWQQGNVFS |
| | | | CSVMHEALHNHYTQKSLSLSPGK |
| 613 | Cross body 2 | ARTIFICIAL | ASTKGPSVFPLAPCSRSTSESTAALGCLVKDYFPEPVTVSWNSGALTSGVHTFPAVLQSSGL |
| | HC | | YSLSSVVTVPSSNFGTQTYTCNVDHKPSNTKVDKTVEPKSSDKTHTCPPCPAPEAAGGPSVF |
| | | | LFPPKPKDTLMISRTPEVTCVVVDVSHEDPEVKFNWYVDGVEVHNAKTKPREEQYNSTYRVV |
| | | | SVLTVLHQDWLNGKEYKCKVSNKALPAPIEKTISKAKGQPREPQVYTLPPSREEMTKNQVSL |
| | | | TCLVKGFYPSDIAVEWESNGQPENNYDTTPPVLDSDGSFFLYSDLTVDKSRWQQGNVFSCSV |
| | | | MHEALHNHYTQKSLSLSPGK |
| 614 | Cross body 2 | ARTIFICIAL | GQPKAAPSVTLFPPSSEELQANKATLVCLISDFYPGAVTVAWKADSSPVKAGVETTTPSKQS |
| | LC | | NNKYAASSYLSLTPEQWKSHRSYSCQVTHEGSTVEKTVAPTECSEPKSSDKTHTCPPCPAPE |
| | | | AAGGPSVFLFPPKPKDTLMISRTPEVTCVVVDVSHEDPEVKFNWYVDGVEVHNAKTKPREEQ |
| | | | YNSTYRVVSVLTVLHQDWLNGKEYKCKVSNKALPAPIEKTISKAKGQPREPQVYTLPPSRKE |
| | | | MTKNQVSLTCLVKGFYPSDIAVEWESNGQPENNYKTTPPVLKSDGSFFLYSKLTVDKSRWQQ |
| | | | GNVFSCSVMHEALHNHYTQKSLSLSPGK |
| 615 | Hetero-Fc | ARTIFICIAL | DKTHTCPPCPAPELLGGPSVFLFPPKPKDTLMISRTPEVTCVVVDVSHEDPEVKFNWYVDGV |
| | binder Fc | | EVHNAKTKPCEEQYGSTYRCVSVLTVLHQDWLNGKEYKCKVSNKALPAPIEKTISKAKGQPR |
| | | | EPQVYTLPPSRKEMTKNQVSLTCLVKGFYPSDIAVEWESNGQPENNYKTTPPVLKSDGSFFL |
| | | | YSKLTVDKSRWQQGNVFSCSVMHEALHNHYTQKSLSLSPGK |
| 616 | Hetero-Fc | ARTIFICIAL | DKTHTCPPCPAPELLGGPSVFLFPPKPKDTLMISRTPEVTCVVVDVSHEDPEVKFNWYVDGV |
| | partner Fc | | EVHNAKTKPCEEQYGSTYRCVSVLTVLHQDWLNGKEYKCKVSNKALPAPIEKTISKAKGQPR |
| | | | EPQVYTLPPSREEMTKNQVSLTCLVKGFYPSDIAVEWESNGQPENNYDTTPPVLDSDGSFFL |
| | | | YSDLTVDKSRWQQGNVFSCSVMHEALHNHYTQKSLSLSPGK |
| 617 | Maxi-body 1 | ARTIFICIAL | EPKSSDKTHTCPPCPAPELLGGPSVFLFPPKPKDTLMISRTPEVTCVVVDVSHEDPEVKENW |
| | target Fc | | YVDGVEVHNAKTKPCEEQYGSTYRCVSVLTVLHQDWLNGKEYKCKVSNKALPAPIEKTISKA |
| | | | KGQPREPQVYTLPPSRKEMTKNQVSLTCLVKGFYPSDIAVEWESNGQPENNYKTTPPVLKSD |
| | | | GSFFLYSKLTVDKSRWQQGNVFSCSVMHEALHNHYTQKSLSLSPGK |
| 618 | Maxi-body 1 | ARTIFICIAL | EPKSSDKTHTCPPCPAPELLGGPSVFLFPPKPKDTLMISRTPEVTCVVVDVSHEDPEVKENW |
| | CD3 Fc | | YVDGVEVHNAKTKPCEEQYGSTYRCVSVLTVLHQDWLNGKEYKCKVSNKALPAPIEKTISKA |
| | | | KGQPREPQVYTLPPSREEMTKNQVSLTCLVKGFYPSDIAVEWESNGQPENNYDTTPPVLDSD |
| | | | GSFFLYSDLTVDKSRWQQGNVFSCSVMHEALHNHYTQKSLSLSPGK |
| 619 | Maxi-body 2 | ARTIFICIAL | EPKSSDKTHTCPPCPAPEAAGGPSVFLFPPKPKDTLMISRTPEVTCVVVDVSHEDPEVKENW |
| | target Fc | | YVDGVEVHNAKTKPREEQYNSTYRVVSVLTVLHQDWLNGKEYKCKVSNKALPAPIEKTISKA |
| | | | KGQPREPQVYTLPPSRKEMTKNQVSLTCLVKGFYPSDIAVEWESNGQPENNYKTTPPVLKSD |
| | | | GSFFLYSKLTVDKSRWQQGNVFSCSVMHEALHNHYTQKSLSLSPGK |
| 620 | Maxi-body 2 | ARTIFICIAL | EPKSSDKTHTCPPCPAPEAAGGPSVFLFPPKPKDTLMISRTPEVTCVVVDVSHEDPEVKENW |
| | CD3 Fc | | YVDGVEVHNAKTKPREEQYNSTYRVVSVLTVLHQDWLNGKEYKCKVSNKALPAPIEKTISKA |
| | | | KGQPREPQVYTLPPSREEMTKNQVSLTCLVKGFYPSDIAVEWESNGQPENNYDTTPPVLDSD |
| | | | GSFFLYSDLTVDKSRWQQGNVFSCSVMHEALHNHYTQKSLSLSPGK |
| 621 | Mono Fc | ARTIFICIAL | APELLGGPSVFLFPPKPKDTLMISRTPEVTCVVVDVSHEDPEVKFNWYVDGVEVHNAKTKPR |
| | | | EEQYNSTYRVVSVLTVLHQDWLNGKEYKCKVSNKALPAPIEKTISKAKGQPREPQVTTLPPS |
| | | | REEMTKNQVSLTCLVKGFYPSDIAVEWESNGQPENNYDTTPPVLDSDGSFFLYSDLTVDKSR |
| | | | WQQGNVFSCSVMHEALHNHYTQKSLSLSPGK |
| 622 | Fc monomer-1 | ARTIFICIAL | DKTHTCPPCPAPELLGGPSVFLFPPKPKDTLMISRTPEVTCVVVDVSHEDPEVKFNWYVDGV |
| | +c/−g | | EVHNAKTKPCEEQYGSTYRCVSVLTVLHQDWLNGKEYKCKVSNKALPAPIEKTISKAKGQPR |
| | | | EPQVYTLPPSREEMTKNQVSLTCLVKGFYPSDIAVEWESNGQPENNYKTTPPVLDSDGSFFL |
| | | | YSKLTVDKSRWQQGNVFSCSVMHEALHNHYTQKSLSLSPGK |
| 623 | Fc monomer-2 | ARTIFICIAL | DKTHTCPPCPAPELLGGPSVFLFPPKPKDTLMISRTPEVTCVVVDVSHEDPEVKFNWYVDGV |
| | +c/−g/delGK | | EVHNAKTKPCEEQYGSTYRCVSVLTVLHQDWLNGKEYKCKVSNKALPAPIEKTISKAKGQPR |
| | | | EPQVYTLPPSREEMTKNQVSLTCLVKGFYPSDIAVEWESNGQPENNYKTTPPVLDSDGSFFL |
| | | | YSKLTVDKSRWQQGNVFSCSVMHEALHNHYTQKSLSLSP |
| 624 | Fc monomer-3 | ARTIFICIAL | DKTHTCPPCPAPELLGGPSVFLFPPKPKDTLMISRTPEVTCVVVDVSHEDPEVKFNWYVDGV |
| | −c/+g | | EVHNAKTKPREEQYNSTYRVVSVLTVLHQDWLNGKEYKCKVSNKALPAPIEKTISKAKGQPR |
| | | | EPQVYTLPPSREEMTKNQVSLTCLVKGFYPSDIAVEWESNGQPENNYKTTPPVLDSDGSFFL |
| | | | YSKLTVDKSRWQQGNVFSCSVMHEALHNHYTQKSLSLSPGK |
| 625 | Fc monomer-4 | ARTIFICIAL | DKTHTCPPCPAPELLGGPSVFLFPPKPKDTLMISRTPEVTCVVVDVSHEDPEVKFNWYVDGV |
| | −c/+g/delGK | | EVHNAKTKPREEQYNSTYRVVSVLTVLHQDWLNGKEYKCKVSNKALPAPIEKTISKAKGQPR |
| | | | EPQVYTLPPSREEMTKNQVSLTCLVKGFYPSDIAVEWESNGQPENNYKTTPPVLDSDGSFFL |
| | | | YSKLTVDKSRWQQGNVFSCSVMHEALHNHYTQKSLSLSP |
| 626 | Fc monomer-5 | ARTIFICIAL | DKTHTCPPCPAPELLGGPSVFLFPPKPKDTLMISRTPEVTCVVVDVSHEDPEVKFNWYVDGV |
| | −c/−g | | EVHNAKTKPREEQYGSTYRVVSVLTVLHQDWLNGKEYKCKVSNKALPAPIEKTISKAKGQPR |
| | | | EPQVYTLPPSREEMTKNQVSLTCLVKGFYPSDIAVEWESNGQPENNYKTTPPVLDSDGSFFL |
| | | | YSKLTVDKSRWQQGNVFSCSVMHEALHNHYTQKSLSLSPGK |
| 627 | Fc monomer-6 | ARTIFICIAL | DKTHTCPPCPAPELLGGPSVFLFPPKPKDTLMISRTPEVTCVVVDVSHEDPEVKFNWYVDGV |
| | −c/−g/delGK | | EVHNAKTKPREEQYGSTYRVVSVLTVLHQDWLNGKEYKCKVSNKALPAPIEKTISKAKGQPR |
| | | | EPQVYTLPPSREEMTKNQVSLTCLVKGFYPSDIAVEWESNGQPENNYKTTPPVLDSDGSFFL |
| | | | YSKLTVDKSRWQQGNVFSCSVMHEALHNHYTQKSLSLSP |
| 628 | Fc monomer-7 | ARTIFICIAL | DKTHTCPPCPAPELLGGPSVFLFPPKPKDTLMISRTPEVTCVVVDVSHEDPEVKFNWYVDGV |
| | +c/+g | | EVHNAKTKPCEEQYNSTYRCVSVLTVLHQDWLNGKEYKCKVSNKALPAPIEKTISKAKGQPR |
| | | | EPQVYTLPPSREEMTKNQVSLTCLVKGFYPSDIAVEWESNGQPENNYKTTPPVLDSDGSFFL |
| | | | YSKLTVDKSRWQQGNVFSCSVMHEALHNHYTQKSLSLSPGK |
| 629 | Fc monomer-8 | ARTIFICIAL | DKTHTCPPCPAPELLGGPSVFLFPPKPKDTLMISRTPEVTCVVVDVSHEDPEVKFNWYVDGV |
| | +c/+g/delGK | | EVHNAKTKPCEEQYNSTYRCVSVLTVLHQDWLNGKEYKCKVSNKALPAPIEKTISKAKGQPR |
| | | | EPQVYTLPPSREEMTKNQVSLTCLVKGFYPSDIAVEWESNGQPENNYKTTPPVLDSDGSFFL |
| | | | YSKLTVDKSRWQQGNVFSCSVMHEALHNHYTQKSLSLSP |
| 630 | scFc-1 | ARTIFICIAL | DKTHTCPPCPAPELLGGPSVFLFPPKPKDTLMISRTPEVTCVVVDVSHEDPEVKFNWYVDGV |
| | | | EVHNAKTKPCEEQYGSTYRCVSVLTVLHQDWLNGKEYKCKVSNKALPAPIEKTISKAKGQPR |
| | | | EPQVYTLPPSREEMTKNQVSLTCLVKGFYPSDIAVEWESNGQPENNYKTTPPVLDSDGSFFL |
| | | | YSKLTVDKSRWQQGNVFSCSVMHEALHNHYTQKSLSLSPGKGGGGSGGGGSGGGGSGGGGSG |
| | | | GGGSGGGGSDKTHTCPPCPAPELLGGPSVFLFPPKPKDTLMISRTPEVTCVVVDVSHEDPEV |
| | | | KFNWYVDGVEVHNAKTKPCEEQYGSTYRCVSVLTVLHQDWLNGKEYKCKVSNKALPAPIEKT |
| | | | ISKAKGQPREPQVYTLPPSREEMTKNQVSLTCLVKGFYPSDIAVEWESNGQPENNYKTTPPV |
| | | | LDSDGSFFLYSKLTVDKSRWQQGNVFSCSVMHEALHNHYTQKSLSLSPGK |
| 631 | scFc-2 | ARTIFICIAL | DKTHTCPPCPAPELLGGPSVFLFPPKPKDTLMISRTPEVTCVVVDVSHEDPEVKFNWYVDGV |
| | | | EVHNAKTKPCEEQYGSTYRCVSVLTVLHQDWLNGKEYKCKVSNKALPAPIEKTISKAKGQPR |
| | | | EPQVYTLPPSREEMTKNQVSLTCLVKGFYPSDIAVEWESNGQPENNYKTTPPVLDSDGSFFL |
| | | | YSKLTVDKSRWQQGNVFSCSVMHEALHNHYTQKSLSLSPGGGGSGGGGSGGGGSGGGGSGGG |
| | | | GSGGGGSDKTHTCPPCPAPELLGGPSVFLFPPKPKDTLMISRTPEVTCVVVDVSHEDPEVKF |
| | | | NWYVDGVEVHNAKTKPCEEQYGSTYRCVSVLTVLHQDWLNGKEYKCKVSNKALPAPIEKTIS |
| | | | KAKGQPREPQVYTLPPSREEMTKNQVSLTCLVKGFYPSDIAVEWESNGQPENNYKTTPPVLD |
| | | | SDGSFFLYSKLTVDKSRWQQGNVFSCSVMHEALHNHYTQKSLSLSP |
| 632 | ScFc-3 | ARTIFICIAL | DKTHTCPPCPAPELLGGPSVFLFPPKPKDTLMISRTPEVTCVVVDVSHEDPEVKFNWYVDGV |
| | | | EVHNAKTKPREEQYNSTYRVVSVLTVLHQDWLNGKEYKCKVSNKALPAPIEKTISKAKGQPR |
| | | | EPQVYTLPPSREEMTKNQVSLTCLVKGFYPSDIAVEWESNGQPENNYKTTPPVLDSDGSFFL |
| | | | YSKLTVDKSRWQQGNVFSCSVMHEALHNHYTQKSLSLSPGKGGGGSGGGGSGGGGSGGGGSG |
| | | | GGGSGGGGSDKTHTCPPCPAPELLGGPSVFLFPPKPKDTLMISRTPEVTCVVVDVSHEDPEV |
| | | | KFNWYVDGVEVHNAKTKPREEQYNSTYRVVSVLTVLHQDWLNGKEYKCKVSNKALPAPIEKT |
| | | | ISKAKGQPREPQVYTLPPSREEMTKNQVSLTCLVKGFYPSDIAVEWESNGQPENNYKTTPPV |
| | | | LDSDGSFFLYSKLTVDKSRWQQGNVFSCSVMHEALHNHYTQKSLSLSPGK |
| 633 | ScFc-4 | ARTIFICIAL | DKTHTCPPCPAPELLGGPSVFLFPPKPKDTLMISRTPEVTCVVVDVSHEDPEVKFNWYVDGV |
| | | | EVHNAKTKPREEQYNSTYRVVSVLTVLHQDWLNGKEYKCKVSNKALPAPIEKTISKAKGQPR |
| | | | EPQVYTLPPSREEMTKNQVSLTCLVKGFYPSDIAVEWESNGQPENNYKTTPPVLDSDGSFFL |
| | | | YSKLTVDKSRWQQGNVFSCSVMHEALHNHYTQKSLSLSPGGGGSGGGGSGGGGSGGGGSGGG |
| | | | GSGGGGSDKTHTCPPCPAPELLGGPSVFLFPPKPKDTLMISRTPEVTCVVVDVSHEDPEVKF |
| | | | NWYVDGVEVHNAKTKPREEQYNSTYRVVSVLTVLHQDWLNGKEYKCKVSNKALPAPIEKTIS |
| | | | KAKGQPREPQVYTLPPSREEMTKNQVSLTCLVKGFYPSDIAVEWESNGQPENNYKTTPPVLD |
| | | | SDGSFFLYSKLTVDKSRWQQGNVFSCSVMHEALHNHYTQKSLSLSP |
| 634 | ScFc-5 | ARTIFICIAL | DKTHTCPPCPAPELLGGPSVFLFPPKPKDTLMISRTPEVTCVVVDVSHEDPEVKFNWYVDGV |
| | | | EVHNAKTKPREEQYGSTYRVVSVLTVLHQDWLNGKEYKCKVSNKALPAPIEKTISKAKGQPR |
| | | | EPQVYTLPPSREEMTKNQVSLTCLVKGFYPSDIAVEWESNGQPENNYKTTPPVLDSDGSFFL |
| | | | YSKLTVDKSRWQQGNVFSCSVMHEALHNHYTQKSLSLSPGKGGGGSGGGGSGGGGSGGGGSG |
| | | | GGGSGGGGSDKTHTCPPCPAPELLGGPSVFLFPPKPKDTLMISRTPEVTCVVVDVSHEDPEV |
| | | | KFNWYVDGVEVHNAKTKPREEQYGSTYRVVSVLTVLHQDWLNGKEYKCKVSNKALPAPIEKT |
| | | | ISKAKGQPREPQVYTLPPSREEMTKNQVSLTCLVKGFYPSDIAVEWESNGQPENNYKTTPPV |
| | | | LDSDGSFFLYSKLTVDKSRWQQGNVFSCSVMHEALHNHYTQKSLSLSPGK |
| 635 | ScFc-6 | ARTIFICIAL | DKTHTCPPCPAPELLGGPSVFLFPPKPKDTLMISRTPEVTCVVVDVSHEDPEVKFNWYVDGV |
| | | | EVHNAKTKPREEQYGSTYRVVSVLTVLHQDWLNGKEYKCKVSNKALPAPIEKTISKAKGQPR |
| | | | EPQVYTLPPSREEMTKNQVSLTCLVKGFYPSDIAVEWESNGQPENNYKTTPPVLDSDGSFFL |
| | | | YSKLTVDKSRWQQGNVFSCSVMHEALHNHYTQKSLSLSPGGGGSGGGGSGGGGSGGGGSGGG |
| | | | GSGGGGSDKTHTCPPCPAPELLGGPSVFLFPPKPKDTLMISRTPEVTCVVVDVSHEDPEVKF |
| | | | NWYVDGVEVHNAKTKPREEQYGSTYRVVSVLTVLHQDWLNGKEYKCKVSNKALPAPIEKTIS |
| | | | KAKGQPREPQVYTLPPSREEMTKNQVSLTCLVKGFYPSDIAVEWESNGQPENNYKTTPPVLD |
| | | | SDGSFFLYSKLTVDKSRWQQGNVFSCSVMHEALHNHYTQKSLSLSP |
| 636 | ScFc-7 | ARTIFICIAL | DKTHTCPPCPAPELLGGPSVFLFPPKPKDTLMISRTPEVTCVVVDVSHEDPEVKFNWYVDGV |
| | | | EVHNAKTKPCEEQYNSTYRCVSVLTVLHQDWLNGKEYKCKVSNKALPAPIEKTISKAKGQPR |
| | | | EPQVYTLPPSREEMTKNQVSLTCLVKGFYPSDIAVEWESNGQPENNYKTTPPVLDSDGSFFL |
| | | | YSKLTVDKSRWQQGNVFSCSVMHEALHNHYTQKSLSLSPGKGGGGSGGGGSGGGGSGGGGSG |
| | | | GGGSGGGGSDKTHTCPPCPAPELLGGPSVFLFPPKPKDTLMISRTPEVTCVVVDVSHEDPEV |
| | | | KFNWYVDGVEVHNAKTKPCEEQYNSTYRCVSVLTVLHQDWLNGKEYKCKVSNKALPAPIEKT |
| | | | ISKAKGQPREPQVYTLPPSREEMTKNQVSLTCLVKGFYPSDIAVEWESNGQPENNYKTTPPV |
| | | | LDSDGSFFLYSKLTVDKSRWQQGNVFSCSVMHEALHNHYTQKSLSLSPGK |
| 637 | scFc-8 | ARTIFICIAL | DKTHTCPPCPAPELLGGPSVFLFPPKPKDTLMISRTPEVTCVVVDVSHEDPEVKFNWYVDGV |
| | | | EVHNAKTKPCEEQYNSTYRCVSVLTVLHQDWLNGKEYKCKVSNKALPAPIEKTISKAKGQPR |
| | | | EPQVYTLPPSREEMTKNQVSLTCLVKGFYPSDIAVEWESNGQPENNYKTTPPVLDSDGSFFL |
| | | | YSKLTVDKSRWQQGNVFSCSVMHEALHNHYTQKSLSLSPGGGGSGGGGSGGGGSGGGGSGGG |
| | | | GSGGGGSDKTHTCPPCPAPELLGGPSVFLFPPKPKDTLMISRTPEVTCVVVDVSHEDPEVKF |
| | | | NWYVDGVEVHNAKTKPCEEQYNSTYRCVSVLTVLHQDWLNGKEYKCKVSNKALPAPIEKTIS |
| | | | KAKGQPREPQVYTLPPSREEMTKNQVSLTCLVKGFYPSDIAVEWESNGQPENNYKTTPPVLD |
| | | | SDGSFFLYSKLTVDKSRWQQGNVFSCSVMHEALHNHYTQKSLSLSP |
| 638 | 5x his-tag | ARTIFICIAL | HHHHH |
| 639 | 6x his-tag | ARTIFICIAL | HHHHHH |
| 640 | CL-1 x I2C | ARTIFICIAL | QVQLVQSGAEVKKPGASVKVSCKASGYTFTGYYMHWVRQAPGQCLEWMGWINPNSGGTKYAQ |
| | | | KFQGRVTMTRDTSISTAYMELSRLRSDDTAVYYCARDRITVAGTYYYYGMDVWGQGTTVTVS |
| | | | SGGGGSGGGGSGGGGSDIQMTQSPSSVSASVGDRVTITCRASQGVNNWLAWYQQKPGKAPKL |
| | | | LIYTASSLQSGVPSRFSGSGSGTDFTLTIRSLQPEDFATYYCQQANSFPITFGCGTRLEIKS |
| | | | GGGGSEVQLVESGGGLVQPGGSLKLSCAASGFTFNKYAMNWVRQAPGKGLEWVARIRSKYNN |
| | | | YATYYADSVKDRFTISRDDSKNTAYLQMNNLKTEDTAVYYCVRHGNFGNSYISYWAYWGQGT |
| | | | LVTVSSGGGGSGGGGSGGGGSQTVVTQEPSLTVSPGGTVTLTCGSSTGAVTSGNYPNWVQQK |
| | | | PGQAPRGLIGGTKFLAPGTPARFSGSLLGGKAALTLSGVQPEDEAEYYCVLWYSNRWVFGGG |
| | | | TKLTVL |
| 641 | CL-2 x I2C | ARTIFICIAL | QVQMVQSGAEVKKHGASVKVSCKASGYTFTGYYMHWVRQAPGQCLEWMGWINPNSGGTKYAQ |
| | | | KFQGRVTMTRDTSISTAYMELSRLRSDDTAVYYCARDRITVAGTYYYYGMDVWGQGTTVTVS |
| | | | SGGGGSGGGGSGGGGSDIQMTQSPSSVSASVGDRVTITCRASQGVNNWLAWYQQKPGKAPKL |
| | | | LIYTASSLQSGVPSRFSGSGSGTDFTLTIRSLQPEDFATYYCQQANSFPITFGCGTRLEIKS |
| | | | GGGGSEVQLVESGGGLVQPGGSLKLSCAASGFTFNKYAMNWVRQAPGKGLEWVARIRSKYNN |
| | | | YATYYADSVKDRFTISRDDSKNTAYLQMNNLKTEDTAVYYCVRHGNFGNSYISYWAYWGQGT |
| | | | LVTVSSGGGGSGGGGSGGGGSQTVVTQEPSLTVSPGGTVTLTCGSSTGAVTSGNYPNWVQQK |
| | | | PGQAPRGLIGGTKFLAPGTPARFSGSLLGGKAALTLSGVQPEDEAEYYCVLWYSNRWVFGGG |
| | | | TKLTVL |
| 642 | CL-1 x I2C- | ARTIFICIAL | QVQLVQSGAEVKKPGASVKVSCKASGYTFTGYYMHWVRQAPGQCLEWMGWINPNSGGTKYAQ |
| | 6His | | KFQGRVTMTRDTSISTAYMELSRLRSDDTAVYYCARDRITVAGTYYYYGMDVWGQGTTVTVS |
| | | | SGGGGSGGGGSGGGGSDIQMTQSPSSVSASVGDRVTITCRASQGVNNWLAWYQQKPGKAPKL |
| | | | LIYTASSLQSGVPSRFSGSGSGTDFTLTIRSLQPEDFATYYCQQANSFPITFGCGTRLEIKS |
| | | | GGGGSEVQLVESGGGLVQPGGSLKLSCAASGFTFNKYAMNWVRQAPGKGLEWVARIRSKYNN |
| | | | YATYYADSVKDRFTISRDDSKNTAYLQMNNLKTEDTAVYYCVRHGNFGNSYISYWAYWGQGT |
| | | | LVTVSSGGGGSGGGGSGGGGSQTVVTQEPSLTVSPGGTVTLTCGSSTGAVTSGNYPNWVQQK |
| | | | PGQAPRGLIGGTKFLAPGTPARFSGSLLGGKAALTLSGVQPEDEAEYYCVLWYSNRWVFGGG |
| | | | TKLTVLHHHHHH |
| 643 | CL-2 x I2C- | ARTIFICIAL | QVQMVQSGAEVKKHGASVKVSCKASGYTFTGYYMHWVRQAPGQCLEWMGWINPNSGGTKYAQ |
| | 6His | | KFQGRVTMTRDTSISTAYMELSRLRSDDTAVYYCARDRITVAGTYYYYGMDVWGQGTTVTVS |
| | | | SGGGGSGGGGSGGGGSDIQMTQSPSSVSASVGDRVTITCRASQGVNNWLAWYQQKPGKAPKL |
| | | | LIYTASSLQSGVPSRFSGSGSGTDFTLTIRSLQPEDFATYYCQQANSFPITFGCGTRLEIKS |
| | | | GGGGSEVQLVESGGGLVQPGGSLKLSCAASGFTFNKYAMNWVRQAPGKGLEWVARIRSKYNN |
| | | | YATYYADSVKDRFTISRDDSKNTAYLQMNNLKTEDTAVYYCVRHGNFGNSYISYWAYWGQGT |
| | | | LVTVSSGGGGSGGGGSGGGGSQTVVTQEPSLTVSPGGTVTLTCGSSTGAVTSGNYPNWVQQK |
| | | | PGQAPRGLIGGTKFLAPGTPARFSGSLLGGKAALTLSGVQPEDEAEYYCVLWYSNRWVFGGG |
| | | | TKLTVLHHHHHH |
| 644 | AU1 epitope | ARTIFICIAL | DTYRYI |
| 645 | AU5 epitope | ARTIFICIAL | TDFYLK |
| 646 | T-7 tag | ARTIFICIAL | MASMTGGQQMG |
| 647 | V-5 tag | ARTIFICIAL | GKPIPNPLLGLDST |
| 648 | B-tag | ARTIFICIAL | QYPALT |
| 649 | E2 epitope | ARTIFICIAL | SSTSSDFRDR |
| 650 | FLAG tag | ARTIFICIAL | DYKDDDK |
| 651 | Glu−glu tag | ARTIFICIAL | EYMPME |
| | 1 | | |
| 652 | Glu−glu tag | ARTIFICIAL | EFMPME |
| | 2 | | |
| 653 | Histidine | ARTIFICIAL | KDHLIHNVHKEFHAHAHNK |
| | affinity tag | | |
| 654 | HSV epitope | ARTIFICIAL | QPELAPED |
| 655 | KT3 epitope | ARTIFICIAL | KPPTPPPEPET |
| 656 | Myc epitope | ARTIFICIAL | CEQKLISEEDL |
| 657 | 7x his-tag | ARTIFICIAL | HHHHHHH |
| 658 | 8x his-tag | ARTIFICIAL | HHHHHHHH |
| 659 | S1 tag | ARTIFICIAL | NANNPDWDF |
| 660 | S-tag | ARTIFICIAL | KETAAAKFERQHMDS |
| 661 | Strep-tag 1 | ARTIFICIAL | WSHPQFEK |
| 662 | Strep-tag 2 | ARTIFICIAL | AWAHPQPGG |
| 663 | Universal | ARTIFICIAL | HTTPHH |
| | tag | | |
| 664 | VSV−g | ARTIFICIAL | YTDIEMNRLGK |
| 665 | Protein C | ARTIFICIAL | EDQVDPRLIDGK |
| 666 | Ab156 | ARTIFICIAL | RDWDFDVFGGGTPVGG |
| 667 | H−cDR3 | ARTIFICIAL | X₁LIVX₂APX₃, WHEREIN X₁ IS EITHER A OR N; X₂ IS EITHER V OR E; |
| | | | AND X₃ IS EITHER V OR A, |
| 668 | H−cDR3 | ARTIFICIAL | DX₁LIVX₂APX₃T, WHEREIN X₁ IS EITHER A OR N; X₂ IS EITHER V OR E; |
| | | | AND X₃ IS EITHER V OR A, |
| 669 | H−cDR3 | ARTIFICIAL | DX₁LIVX₂APX₃TRDYYYYGMDV, WHEREIN X₁ IS EITHER A OR N; X₂ IS |
| | | | EITHER V OR E; AND X₃ IS EITHER V OR A |
| 670 | CD3 BINDER/ | ARTIFICIAL | KYAIN |
| | I2E - HCDR1 | | |
| 671 | CD3 BINDER/ | ARTIFICIAL | RIRSKYNNYATYYADAVKD |
| | I2E - HCDR2 | | |
| 672 | CD3 BINDER/ | ARTIFICIAL | AGNFGSSYISYWAY |
| | I2E - HCDR3 | | |
| 673 | CD3 BINDER/ | ARTIFICIAL | GSSTGAVTSGNYPN |
| | I2E - LCDR1 | | |
| 674 | CD3 BINDER | ARTIFICIAL | GTKFLAP |
| | /I2E - LCDR2 | | |
| 675 | CD3 BINDER | ARTIFICIAL | VLWYSNRWV |
| | I2E - LCDR3 | | |
| 676 | CD3 BINDER/ | ARTIFICIAL | EVQLVESGGGLVQPGGSLKLSCAASGFTFNKYAINWVRQAPGKGLEWVARIRSKYNNYATYY |
| | I2E - VH | | ADAVKDRFTISRDDSKNTVYLQMNNLKTEDTAVYYCARAGNFGSSYISYWAYWGQGTLVTVS |
| | | | S |
| 677 | CD3 BINDER/ | ARTIFICIAL | QTVVTQEPSLTVSPGGTVTITCGSSTGAVTSGNYPNWVQKKPGQAPRGLIGGTKFLAPGTPA |
| | I2E - VL | | RFSGSLSGGKAALTLSGVQPEDEAEYYCVLWYSNRWVFGSGTKLTVL |
| 678 | CD3 BINDER/ | ARTIFICIAL | EVQLVESGGGLVQPGGSLKLSCAASGFTFNKYAINWVRQAPGKGLEWVARIRSKYNNYATYY |
| | I2E-SCFV | | ADAVKDRFTISRDDSKNTVYLQMNNLKTEDTAVYYCARAGNFGSSYISYWAYWGQGTLVTVS |
| | (G4S)3 | | SGGGGSGGGGSGGGGSQTVVTQEPSLTVSPGGTVTITCGSSTGAVTSGNYPNWVQKKPGQAP |
| | | | RGLIGGTKFLAPGTPARFSGSLSGGKAALTLSGVQPEDEAEYYCVLWYSNRWVFGSGTKLTV |
| | | | L |
| 679 | G4-linker | ARTIFICIAL | GGGG |
| 680 | HCDR1 | ARTIFICIAL | GYSFTGYT |
| 681 | HCDR2 | ARTIFICIAL | INPYNGGT |
| 682 | HCDR2 | ARTIFICIAL | INPYNGGS |
| 683 | HCDR2 | ARTIFICIAL | INPYNGGI |
| 684 | HCDR3 | ARTIFICIAL | ARDYGYVLDY |
| 685 | HCDR3 | ARTIFICIAL | ARDFGYVLDY |
| 686 | HCDR3 | ARTIFICIAL | ARDYGFVLDY |
| 687 | HCDR3 | ARTIFICIAL | ARDYGYVFDY |
| 688 | LCDR1 | ARTIFICIAL | SSVSY |
| 689 | LCDR1 | ARTIFICIAL | SSVNY |
| 690 | LCDR2 | ARTIFICIAL | STS |
| 691 | LCDR3 | ARTIFICIAL | QQRSIYPPWT |
| 692 | LCDR3 | ARTIFICIAL | QQRSNYPPWT |
| 693 | LCDR3 | ARTIFICIAL | QQRSTYPPWT |
| 694 | LCDR3 | ARTIFICIAL | QQRNNYPPWT |
| 695 | LCDR1 | ARTIFICIAL | RASQSVX₁SX₂YLA, X₁ is selected from S and R, X₂ is selected from |
| | | | S and T |
| 696 | LCDR3 | ARTIFICIAL | QQYX₁X₂SPX₃T, X₁ is selected from G, D, and Q, X₂ is selected |
| | | | from S, A and T, X₃ is selected from L and I |

1. A polypeptide or a polypeptide construct comprising
a domain which binds to human CLDN6 (SEQ ID NO: 1), and
a domain which binds to human CD3, and
a domain extending the half-life of the polypeptide, wherein the domain, which binds to human CLDN6, binds to amino acids 29-39 of the amino acid sequence set forth in SEQ ID NO: 1 in the extracellular loop 1 (ECL1) of CLDN6 comprising the amino acid sequence set forth in SEQ ID NO: 9, and/or to amino acids 151-160 of the amino acid sequence set forth in SEQ ID NO: 1 in the extracellular loop 2 (ECL2) of CLDN6 comprising the amino acid sequence set forth in SEQ ID NO: 10,
wherein the domain which binds to human CLDN6 comprises a variable heavy chain (VH) region comprising a CDR-H1, a CDR-H2, and a CDR-H3 and a variable light chain (VL) region comprising a CDR-L1, a CDR-L2, and a CDR-L3 selected from the group consisting of:
a) a VH region comprising a CDR-H1 comprising the amino acid sequence set forth in SEQ ID NO: 13, a CDR-H2 comprising the amino acid sequence set forth in SEQ ID NO: 14, and a CDR-H3 comprising the amino acid sequence set forth in SEQ ID NO: 15, and a VL region comprising a CDR-L1 comprising the amino acid sequence set forth in SEQ ID NO: 16, a CDR-L2 comprising the amino acid sequence set forth in SEQ ID NO: 17 and a CDR-L3 comprising the amino acid sequence set forth in SEQ ID NO: 18;
b) a VH region comprising a CDR-H1 comprising the amino acid sequence set forth in SEQ ID NO: 27, a CDR-H2 comprising the amino acid sequence set forth in SEQ ID NO: 28, and a CDR-H3 comprising the amino acid sequence set forth in SEQ ID NO: 29, and a VL region comprising a CDR-L1 comprising the amino acid sequence set forth in SEQ ID NO: 30, a CDR-L2 comprising the amino acid sequence set forth in SEQ ID NO: 31 and a CDR-L3 comprising the amino acid sequence set forth in SEQ ID NO: 32;
c) a VH region comprising a CDR-H1 comprising the amino acid sequence set forth in SEQ ID NO: 41, a CDR-H2 comprising the amino acid sequence set forth in SEQ ID NO: 42, and a CDR-H3 comprising the amino acid sequence set forth in SEQ ID NO: 43, and a VL region comprising a CDR-L1 comprising the amino acid sequence set forth in SEQ ID NO: 44, a CDR-L2 comprising the amino acid sequence set forth in SEQ ID NO: 45 and a CDR-L3 comprising the amino acid sequence set forth in SEQ ID NO: 46;
d) a VH region comprising a CDR-H1 comprising the amino acid sequence set forth in SEQ ID NO: 55, a CDR-H2 comprising the amino acid sequence set forth in SEQ ID NO: 56, and a CDR-H3 comprising the amino acid sequence set forth in SEQ ID NO: 57, and a VL region comprising a CDR-L1 comprising the amino acid sequence set forth in SEQ ID NO: 58, a CDR-L2 comprising the amino acid sequence set forth in SEQ ID NO: 59 and a CDR-L3 comprising the amino acid sequence set forth in SEQ ID NO: 60;
e) a VH region comprising a CDR-H1 comprising the amino acid sequence set forth in SEQ ID NO: 69, a CDR-H2 comprising the amino acid sequence set forth in SEQ ID NO: 70, and a CDR-H3 comprising the amino acid sequence set forth in SEQ ID NO: 71, and a VL region comprising a CDR-L1 comprising the amino acid sequence set forth in SEQ ID NO: 72, a CDR-L2 comprising the amino acid sequence set forth in SEQ ID NO: 73 and a CDR-L3 comprising the amino acid sequence set forth in SEQ ID NO: 74;
f) a VH region comprising a CDR-H1 comprising the amino acid sequence set forth in SEQ ID NO: 83, a CDR-H2 comprising the amino acid sequence set forth in SEQ ID NO: 84, and a CDR-H3 comprising the amino acid sequence set forth in SEQ ID NO: 85, and a VL region comprising a CDR-L1 comprising the amino acid sequence set forth in SEQ ID NO: 86, a CDR-L2 comprising the amino acid sequence set forth in SEQ ID NO: 87 and a CDR-L3 comprising the amino acid sequence set forth in SEQ ID NO: 88;
q) a VH region comprising a CDR-H1 comprising the amino acid sequence set forth in SEQ ID NO: 97, a CDR-H2 comprising the amino acid sequence set forth in SEQ ID NO: 98, and a CDR-H3 comprising the amino acid sequence set forth in SEQ ID NO: 99, and a VL region comprising a CDR-L1 comprising the amino acid sequence set forth in SEQ ID NO: 100, a CDR-L2 comprising the amino acid sequence set forth in SEQ ID NO: 101 and a CDR-L3 comprising the amino acid sequence set forth in SEQ ID NO: 102;
h) a VH region comprising a CDR-H1 comprising the amino acid sequence set forth in SEQ ID NO: 111, a CDR-H2 comprising the amino acid sequence set forth in SEQ ID NO: 112, and a CDR-H3 comprising the amino acid sequence set forth in SEQ ID NO: 113, and a VL region comprising a CDR-L1 comprising the amino acid sequence set forth in SEQ ID NO: 114, a CDR-L2 comprising the amino acid sequence set forth in SEQ ID NO: 115 and a CDR-L3 comprising the amino acid sequence set forth in SEQ ID NO: 116;
i) a VH region comprising a CDR-H1 comprising the amino acid sequence set forth in SEQ ID NO: 125, a CDR-H2 comprising the amino acid sequence set forth in SEQ ID NO: 126, and a CDR-H3 comprising the amino acid sequence set forth in SEQ ID NO: 127, and a VL region comprising a CDR-L1 comprising the amino acid sequence set forth in SEQ ID NO: 128, a CDR-L2 comprising the amino acid sequence set forth in SEQ ID NO: 129 and a CDR-L3 comprising the amino acid sequence set forth in SEQ ID NO: 130;
j) a VH region comprising a CDR-H1 comprising the amino acid sequence set forth in SEQ ID NO: 139, a CDR-H2 comprising the amino acid sequence set forth in SEQ ID NO: 140, and a CDR-H3 comprising the amino acid sequence set forth in SEQ ID NO: 141, and a VL region comprising a CDR-L1 comprising the amino acid sequence set forth in SEQ ID NO: 142, a CDR-L2 comprising the amino acid sequence set forth in SEQ ID NO: 143 and a CDR-L3 comprising the amino acid sequence set forth in SEQ ID NO: 144;
k) a VH region comprising a CDR-H1 comprising the amino acid sequence set forth in SEQ ID NO: 153, a CDR-H2 comprising the amino acid sequence set forth in SEQ ID NO: 154, and a CDR-H3 comprising the amino acid sequence set forth in SEQ ID NO: 155, and a VL region comprising a CDR-L1 comprising the amino acid sequence set forth in SEQ ID NO: 156, a CDR-L2 comprising the amino acid sequence set forth in SEQ ID NO: 157 and a CDR-L3 comprising the amino acid sequence set forth in SEQ ID NO: 158;
l) a VH region comprising a CDR-H1 comprising the amino acid sequence set forth in SEQ ID NO: 167, a CDR-H2 comprising the amino acid sequence set forth in SEQ ID NO: 168, and a CDR-H3 comprising the amino acid sequence set forth in SEQ ID NO: 169, and a VL region comprising a CDR-L1 comprising the amino acid sequence set forth in SEQ ID NO: 170, a CDR-L2 comprising the amino acid sequence set forth in SEQ ID NO: 171 and a CDR-L3 comprising the amino acid sequence set forth in SEQ ID NO: 172;
m) a VH region comprising a CDR-H1 comprising the amino acid sequence set forth in SEQ ID NO: 181, a CDR-H2 comprising the amino acid sequence set forth in SEQ ID NO: 182, and a CDR-H3 comprising the amino acid sequence set forth in SEQ ID NO: 183, and a VL region comprising a CDR-L1 comprising the amino acid sequence set forth in SEQ ID NO: 184, a CDR-L2 comprising the amino acid sequence set forth in SEQ ID NO: 185 and a CDR-L3 comprising the amino acid sequence set forth in SEQ ID NO: 186;
n) a VH region comprising a CDR-H1 comprising the amino acid sequence set forth in SEQ ID NO: 195, a CDR-H2 comprising the amino acid sequence set forth in SEQ ID NO: 196, and a CDR-H3 comprising the amino acid sequence set forth in SEQ ID NO: 197, and a VL region comprising a CDR-L1 comprising the amino acid sequence set forth in SEQ ID NO: 198, a CDR-L2 comprising the amino acid sequence set forth in SEQ ID NO: 199 and a CDR-L3 comprising the amino acid sequence set forth in SEQ ID NO: 200;
o) a VH region comprising a CDR-H1 comprising the amino acid sequence set forth in SEQ ID NO: 209, a CDR-H2 comprising the amino acid sequence set forth in SEQ ID NO: 210, and a CDR-H3 comprising the amino acid sequence set forth in SEQ ID NO: 211, and a VL region comprising a CDR-L1 comprising the amino acid sequence set forth in SEQ ID NO: 212, a CDR-L2 comprising the amino acid sequence set forth in SEQ ID NO: 213 and a CDR-L3 comprising the amino acid sequence set forth in SEQ ID NO: 214;
p) a VH region comprising a CDR-H1 comprising the amino acid sequence set forth in SEQ ID NO: 223, a CDR-H2 comprising the amino acid sequence set forth in SEQ ID NO: 224, and a CDR-H3 comprising the amino acid sequence set forth in SEQ ID NO: 225, and a VL region comprising a CDR-L1 comprising the amino acid sequence set forth in SEQ ID NO: 226, a CDR-L2 comprising the amino acid sequence set forth in SEQ ID NO: 227 and a CDR-L3 comprising the amino acid sequence set forth in SEQ ID NO: 228;
q) a VH region comprising a CDR-H1 comprising the amino acid sequence set forth in SEQ ID NO: 237, a CDR-H2 comprising the amino acid sequence set forth in SEQ ID NO: 238, and a CDR-H3 comprising the amino acid sequence set forth in SEQ ID NO: 239, and a VL region comprising a CDR-L1 comprising the amino acid sequence set forth in SEQ ID NO: 240, a CDR-L2 comprising the amino acid sequence set forth in SEQ ID NO: 241 and a CDR-L3 comprising the amino acid sequence set forth in SEQ ID NO: 242;
r) a VH region comprising a CDR-H1 comprising the amino acid sequence set forth in SEQ ID NO: 251, a CDR-H2 comprising the amino acid sequence set forth in SEQ ID NO: 252, and a CDR-H3 comprising the amino acid sequence set forth in SEQ ID NO: 253, and a VL region comprising a CDR-L1 comprising the amino acid sequence set forth in SEQ ID NO: 254, a CDR-L2 comprising the amino acid sequence set forth in SEQ ID NO: 255 and a CDR-L3 as comprising the amino acid sequence set forth in SEQ ID NO: 256, and
s) a VH region comprising a CDR-H1 comprising the amino acid sequence set forth in SEQ ID NO: 265, a CDR-H2 comprising the amino acid sequence set forth in SEQ ID NO: 266, and a CDR-H3 comprising the amino acid sequence set forth in SEQ ID NO: 267, and a VL region comprising a CDR-L1 comprising the amino acid sequence set forth in SEQ ID NO: 268, a CDR-L2 comprising the amino acid sequence set forth in SEQ ID NO: 269, and a CDR-L3 as comprising the amino acid sequence set forth in SEQ ID NO: 270.

2-7. (canceled)

8. The polypeptide or polypeptide construct of claim 1, wherein
a) the polypeptide or polypeptide construct is a single chain construct,
b) the domain binding to CLDN6 is in the format of an scFv,
c) the domain binding to CD3 is in the format of an scFv,
d) the domains are connected via a linker, and/or
e) the polypeptide or polypeptide construct comprises a domain providing an extended serum half-life.

9-10. (canceled)

11. The polypeptide or polypeptide construct of claim 1, wherein the domain binding to CLDN6 comprises a VH region comprising the amino acid sequence set forth in SEQ ID NO: 11, SEQ ID NO: 25, SEQ ID NO: 39, SEQ ID NO: 53, SEQ ID NO: 67, SEQ ID NO: 81, SEQ ID NO: 95, SEQ ID NO: 109, SEQ ID NO: 123, SEQ ID NO: 137, SEQ ID NO: 151, SEQ ID NO: 165, SEQ ID NO: 179, SEQ ID NO: 193, SEQ ID NO: 207, SEQ ID NO: 221, SEQ ID NO: 235, SEQ ID NO: 249, or SEQ ID NO: 263,
wherein said VH region amino acid sequence may have one or more modifications of one or several amino acid residues in the framework and/or hypervariable regions, provided said domain comprising said modified VH region selectively binds to CLDN6, and
optionally wherein said domain is part of a polypeptide or polypeptide construct that activates T cells and maintains the ability to induce T cell-dependent cytotoxicity,
further, optionally, wherein said domain is part of a polypeptide or polypeptide construct that activates T cells and maintains the ability to induce T cell-dependent cytotoxicity with more than 1000 fold efficacy than in an identical cell type which expresses CLDN9, but does not express CLDN6, and
still further optionally, wherein said domain is part of a polypeptide or polypeptide construct that is not capable of activating T cells and inducing T cell-dependent cytotoxicity in CLDN6-negative cells of the same cell type, preferably when tested in an in vitro cytotoxicity assay.

12. The polypeptide or polypeptide construct of claim 1, wherein the domain binding to CLDN6 comprises a VL region comprising the amino acid sequence set forth in SEQ ID NO: 12, SEQ ID NO: 26, SEQ ID NO: 40, SEQ ID NO: 54, SEQ ID NO: 68, SEQ ID NO: 82, SEQ ID NO: 96, SEQ ID NO: 110, SEQ ID NO: 124, SEQ ID NO: 138, SEQ ID NO: 152, SEQ ID NO: 166, SEQ ID NO: 180, SEQ ID NO: 194, SEQ ID NO: 208, SEQ ID NO: 222, SEQ ID NO: 236, SEQ ID NO: 250, or SEQ ID NO: 264,
wherein said VL region amino acid sequence may have one or more modifications of one or several amino acid residues in the framework and/or hypervariable regions, provided said domain comprising said modified VL region selectively binds to CLDN6, and
optionally wherein said domain is part of a polypeptide or polypeptide construct that activates T cells and maintains the ability to induce T cell-dependent cytotoxicity in target cells,
further, optionally, wherein said domain is part of a polypeptide or polypeptide construct that activates T cells and maintains the ability to induce T cell-dependent cytotoxicity with more than 500 fold efficacy than in control cells which do not express CLDN6, wherein these cells optionally express CLDN9, but
still further optionally, wherein said domain is part of a polypeptide or polypeptide construct that is not capable of activating T cells and inducing T cell-dependent cytotoxicity in CLDN6-negative cells of the same cell type, preferably when tested in a in vitro cytotoxicity assay.

13. The polypeptide or polypeptide construct of claim 1, wherein the domain binding to CLDN6 comprises a pair of a VH region and a VL region comprising the amino acid sequences set forth in SEQ ID NOs: 11 and 12, SEQ ID NO: 25 and 26, SEQ ID NO: 39 and 40, SEQ ID NO: 53 and 54, SEQ ID NO: 67 and 68, SEQ ID NO: 81 and 82, SEQ ID NO: 95 and 96, SEQ ID NO: 109 and 110, SEQ ID NO: 123 and 124, SEQ ID NO: 137 and 138, SEQ ID NO: 151 and 152, SEQ ID NO: 165 and 166, SEQ ID NO: 179 and 180, SEQ ID NO: 193 and 194, SEQ ID NO: 207 and 208, SEQ ID NO: 221 and 222, SEQ ID NO: 235 and 236, SEQ ID NO: 249 and 250, or SEQ ID NO: 263 and 264.

14. The polypeptide or polypeptide construct of claim 1, wherein the domain binding to CLDN6 comprises the amino acid sequence set forth in SEQ ID NO: 19, SEQ ID NO: 22, SEQ ID NO: 33, SEQ ID NO: 36, SEQ ID NO: 47, SEQ ID NO: 50, SEQ ID NO: 61, SEQ ID NO: 64, SEQ ID NO: 75, SEQ ID NO: 78, SEQ ID NO: 89, SEQ ID NO: 92, SEQ ID NO: 103, SEQ ID NO: 106, SEQ ID NO: 117, SEQ ID NO: 120, SEQ ID NO: 131, SEQ ID NO: 134, SEQ ID NO: 145, SEQ ID NO: 148, SEQ ID NO: 159, SEQ ID NO: 162, SEQ ID NO: 173, SEQ ID NO: 176, SEQ ID NO: 187, SEQ ID NO: 190, SEQ ID NO: 201, SEQ ID NO: 204, SEQ ID NO: 215, SEQ ID NO: 218, SEQ ID NO: 229, SEQ ID NO: 232, SEQ ID NO: 243, SEQ ID NO: 246, SEQ ID NO: 257, or SEQ ID NO: 260, SEQ ID NO: 271 or SEQ ID NO: 274.

15. The polypeptide or polypeptide construct of claim 1, comprising:
a) an amino acid sequence comprising at least at least 90, 91, 92, 93, 94, 95, 96, 97, 98 or 99% identity to the amino acid sequence set forth in SEQ ID NO: 19, SEQ ID NO: 20, SEQ ID NO: 21, SEQ ID NO: 22, SEQ ID NO: 23, and SEQ ID NO: 24, SEQ ID NO: 33, SEQ ID NO: 34, SEQ ID NO: 35, SEQ ID NO: 36, SEQ ID NO: 37, and SEQ ID NO: 38, SEQ ID NO: 47, SEQ ID NO: 48, SEQ ID NO: 49, SEQ ID NO: 50, SEQ ID NO: 51, and SEQ ID NO: 52, SEQ ID NO: 61, SEQ ID NO: 62, SEQ ID NO: 63, SEQ ID NO: 64, SEQ ID NO: 65, and SEQ ID NO: 66, SEQ ID NO: 75, SEQ ID NO: 76, SEQ ID NO: 77, SEQ ID NO: 78, SEQ ID NO: 79, and SEQ ID NO: 80, SEQ ID NO: 89, SEQ ID NO: 90, SEQ ID NO: 91, SEQ ID NO: 92, SEQ ID NO: 93, and SEQ ID NO: 94, SEQ ID NO: 103, SEQ ID NO: 104, SEQ ID NO: 105, SEQ ID NO: 106, SEQ ID NO: 107, and SEQ ID NO: 108, SEQ ID NO: 117, SEQ ID NO: 118, SEQ ID NO: 119, SEQ ID NO: 120, SEQ ID NO: 121, and SEQ ID NO: 122, SEQ ID NO: 131, SEQ ID NO: 132, SEQ ID NO: 133, SEQ ID NO: 134, SEQ ID NO: 135, and SEQ ID NO: 136, SEQ ID NO: 145, SEQ ID NO: 146, SEQ ID NO: 147, SEQ ID NO: 148, SEQ ID NO: 149, and SEQ ID NO: 150, SEQ ID NO: 159, SEQ ID NO: 160, SEQ ID NO: 161, SEQ ID NO: 162, SEQ ID NO: 163, and SEQ ID NO: 164, SEQ ID NO: 173, SEQ ID NO: 174, SEQ ID NO: 175, SEQ ID NO: 176, SEQ ID NO: 177, and SEQ ID NO: 178, SEQ ID NO: 187, SEQ ID NO: 188, SEQ ID NO: 189, SEQ ID NO: 190, SEQ ID NO: 191, and SEQ ID NO: 192, SEQ ID NO: 201, SEQ ID NO: 202, SEQ ID NO: 203, SEQ ID NO: 204, SEQ ID NO: 205, and SEQ ID NO: 206, SEQ ID NO: 215, SEQ ID NO: 216, SEQ ID NO: 217, SEQ ID NO: 218, SEQ ID NO: 219, and SEQ ID NO: 220, SEQ ID NO: 229, SEQ ID NO: 230, SEQ ID NO: 231, SEQ ID NO: 232, SEQ ID NO: 233, and SEQ ID NO: 234, SEQ ID NO: 243, SEQ ID NO: 244, SEQ ID NO: 245, SEQ ID NO: 246, SEQ ID NO: 247, and SEQ ID NO: 248, SEQ ID NO: 257, SEQ ID NO: 258, SEQ ID NO: 259, SEQ ID NO: 260, SEQ ID NO: 261, and SEQ ID NO: 262, SEQ ID NO: 271, SEQ ID NO: 272, SEQ ID NO: 273, SEQ ID NO: 274, SEQ ID NO: 275, or SEQ ID NO: 276; and
b) the amino acid sequence set forth in SEQ ID NO: 19, SEQ ID NO: 20, SEQ ID NO: 21, SEQ ID NO: 22, SEQ ID NO: 23, and SEQ ID NO: 24, SEQ ID NO: 33, SEQ ID NO: 34, SEQ ID NO: 35, SEQ ID NO: 36, SEQ ID NO: 37, and SEQ ID NO: 38, SEQ ID NO: 47, SEQ ID NO: 48, SEQ ID NO: 49, SEQ ID NO: 50, SEQ ID NO: 51, and SEQ ID NO: 52, SEQ ID NO: 61, SEQ ID NO: 62, SEQ ID NO: 63, SEQ ID NO: 64, SEQ ID NO: 65, and SEQ ID NO: 66, SEQ ID NO: 75, SEQ ID NO: 76, SEQ ID NO: 77, SEQ ID NO: 78, SEQ ID NO: 79, and SEQ ID NO: 80, SEQ ID NO: 89, SEQ ID NO: 90, SEQ ID NO: 91, SEQ ID NO: 92, SEQ ID NO: 93, and SEQ ID NO: 94, SEQ ID NO: 103, SEQ ID NO: 104, SEQ ID NO: 105, SEQ ID NO: 106, SEQ ID NO: 107, and SEQ ID NO: 108, SEQ ID NO: 117, SEQ ID NO: 118, SEQ ID NO: 119, SEQ ID NO: 120, SEQ ID NO: 121, and SEQ ID NO: 122, SEQ ID NO: 131, SEQ ID NO: 132, SEQ ID NO: 133, SEQ ID NO: 134, SEQ ID NO: 135, and SEQ ID NO: 136, SEQ ID NO: 145, SEQ ID NO: 146, SEQ ID NO: 147, SEQ ID NO: 148, SEQ ID NO: 149, and SEQ ID NO: 150, SEQ ID NO: 159, SEQ ID NO: 160, SEQ ID NO: 161, SEQ ID NO: 162, SEQ ID NO: 163, and SEQ ID NO: 164, SEQ ID NO: 173, SEQ ID NO: 174, SEQ ID NO: 175, SEQ ID NO: 176, SEQ ID NO: 177, and SEQ ID NO: 178, SEQ ID NO: 187, SEQ ID NO: 188, SEQ ID NO: 189, SEQ ID NO: 190, SEQ ID NO: 191, and SEQ ID NO: 192, SEQ ID NO: 201, SEQ ID NO: 202, SEQ ID NO: 203, SEQ ID NO: 204, SEQ ID NO: 205, and SEQ ID NO: 206, SEQ ID NO: 215, SEQ ID NO: 216, SEQ ID NO: 217, SEQ ID NO: 218, SEQ ID NO: 219, and SEQ ID NO: 220, SEQ ID NO: 229, SEQ ID NO: 230, SEQ ID NO: 231, SEQ ID NO: 232, SEQ ID NO: 233, and SEQ ID NO: 234, SEQ ID NO: 243, SEQ ID NO: 244, SEQ ID NO: 245, SEQ ID NO: 246, SEQ ID NO: 247, and SEQ ID NO: 248, SEQ ID NO: 257, SEQ ID NO: 258, SEQ ID NO: 259, SEQ ID NO: 260, SEQ ID NO: 261, and SEQ ID NO: 262, SEQ ID NO: 271, SEQ ID NO: 272, SEQ ID NO: 273, SEQ ID NO: 274, SEQ ID NO: 275, or SEQ ID NO: 276.

16. A polypeptide or a polypeptide construct comprising a CDR-H1 comprising the amino acid sequence set forth in SEQ ID NO: 13, a CDR-H2 comprising the amino acid sequence set forth in SEQ ID NO: 14, and a CDR-H3 comprising the amino acid sequence set forth in SEQ ID NO: 15, and a VL region comprising a CDR-L1 comprising the amino acid sequence set forth in SEQ ID NO: 16, a CDR-L2 comprising the amino acid sequence set forth in SEQ ID NO: 17 and a CDR-L3 depicted comprising the amino acid sequence set forth in SEQ ID NO: 18.

17. A polypeptide or polypeptide construct comprising a VH region comprising the amino acid sequence set forth in SEQ ID NO: 11 and a VL region comprising the amino acid sequence set forth in SEQ ID NO: 12.

18. A polypeptide or polypeptide construct comprising the amino acid sequence set forth in SEQ ID NO: 19.

19. A polypeptide or polypeptide construct comprising the amino acid sequence set forth in SEQ ID NO: 19, SEQ ID NO: 20, SEQ ID NO: 21, SEQ ID NO: 22, SEQ ID NO: 23, or SEQ ID NO: 24.

20. A polypeptide or a polypeptide construct comprising a domain which binds to human CLDN6 (SEQ ID NO: 1), and a domain which binds to human CD3, and a domain extending the half-life of the polypeptide, wherein the domain that binds to CLDN6 comprises a variable heavy chain (VH) region comprising a CDR-H1 comprising the amino acid sequence set forth in SEQ ID NO: 13, a CDR-H2 comprising the amino acid sequence set forth in SEQ ID NO: 14, and a CDR-H3 comprising the amino acid sequence set forth in SEQ ID NO: 15, and a variable light chain (VL) region comprising a CDR-L1 comprising the amino acid sequence set forth in SEQ ID NO: 16, a CDR-L2 comprising the amino acid sequence set forth in SEQ ID NO: 17 and a CDR-L3 comprising the amino acid sequence set forth in SEQ ID NO: 18.

21. The polypeptide or polypeptide construct of claim 20, wherein the domain binding to CLDN6 comprises a VH region comprising the amino acid sequence set forth in SEQ ID NO: 11 and a VL region comprising the amino acid sequence set forth in SEQ ID NO: 12.

22. The polypeptide or polypeptide construct of claim 20, wherein the domain binding to CLDN6 comprises the amino acid sequence set forth in SEQ ID NO: 19.

23. The polypeptide or polypeptide construct of claim 20, comprising the amino acid sequence set forth in SEQ ID NO: 19, SEQ ID NO: 20, SEQ ID NO: 21, SEQ ID NO: 22, SEQ ID NO: 23, or SEQ ID NO: 24.

24-25. (canceled)

26. The polypeptide or polypeptide construct of claim 20, wherein the construct is a single chain construct.

27-32. (canceled)

33. The polypeptide or polypeptide construct of claim 20, wherein the polypeptide or polypeptide construct comprises any one of the amino acid sequences set forth in SEQ ID NO: 35, 38, 49, 52, 63, 66, 77, 80, 91, 94, 105, 108, 119, 122, 133, 136, 147, 150, 161, 164, 175,178, 189, 192,203,206,217,220,231,234,245, 148, 259, 262, 273, 276, 287, 290, 301, 304, 315, 318, 329, 332, 343, 346, 357, 360, 371, 374, 385, 388, 399, 402, 413, 416, 427, or 430.

34. The polypeptide or polypeptide construct of claim 20, wherein the polypeptide or polypeptide construct comprises a domain binding to CD3 comprising a VH domain comprising at least one, two, or all of the following CDR sequences as set forth in SEQ ID NO: 670, 671, and/or 672.

35. The polypeptide or polypeptide construct of claim 20, wherein the polypeptide or polypeptide construct comprises a domain binding to CD3 comprising a VL domain comprising at least one, two, or all of the following CDR sequences as set forth in SEQ ID NO: 673, 674, and/or 675.

36. The polypeptide or polypeptide construct of claim 20, wherein the polypeptide or polypeptide construct comprises a domain binding to CD3 comprising a VH domain and a VL domain comprising at least one, two, or all of the following CDR sequences as set forth in SEQ ID NO: 670, 671, 672, 673, 674, and/or 675.

37. The polypeptide or polypeptide construct of claim 20, wherein the polypeptide or polypeptide construct comprises a domain binding to CD3 comprising a VH domain as set forth in SEQ ID NO: 676.

38. The polypeptide or polypeptide construct of claim 20, wherein the polypeptide or polypeptide construct comprises a domain binding to CD3 comprising a VL domain as set forth in SEQ ID NO: 677.

39. The polypeptide or polypeptide construct of claim 20, wherein the polypeptide or polypeptide construct comprises a domain binding to CD3 comprising a VH domain as set forth in SEQ ID NO: 676 and a VL domain as depicted in SEQ ID NO: 677.

40. The polypeptide or polypeptide construct of claim 20, wherein the polypeptide or polypeptide construct comprises a domain binding to CD3 comprising a scFv domain as set forth in SEQ ID NO: 678.

41. A polynucleotide encoding the polypeptide or polypeptide construct of claim 1.

42. A vector comprising the polynucleotide of claim 41.

43. A host cell transformed or transfected with the polynucleotide of claim 41.

44. A process for producing a polypeptide or polypeptide construct comprising culturing the host cell of claim 43 under conditions allowing the expression of the polypeptide or polypeptide construct and recovering the produced polypeptide or polypeptide construct from the culture.

45. A pharmaceutical composition comprising the polypeptide or polypeptide construct of claim 1.

46-49. (canceled)

50. A method for treating or ameliorating a proliferative disease, a tumorous disease, cancer, or an immunological disorder, comprising the step of administering to a subject in need thereof the polypeptide or polypeptide construct of claim 1, wherein the disease is selected from the group consisting of germ cell cancer, ovarian cancer, uterine cancer, and lung cancer.

The application's sequence listing, which the Patent Office published only in electronic form, follows.

SEQUENCE LISTING (696 sequences)

SEQ ID NO: 1 - protein, 220 aa, Homo sapiens
MASAGMQILGVVLTLLGWVNGLVSCALPMWKVTAFIGNSIVVAQVVWEGLWMSCVVQSTGQMQCKVYDSLLALPQDLQAARALCVIALLVALFGLLVYLAGAKCTTCVEEKDSKARLVLTSGIVFVISGVLTLIPVCWTAHAIIRDFYNPLVAEAQKRELGASLYLGWAASGLLLLGGGLLCCTCPSGGSQGPSHYMARYSTSAPAISRGPSEYPTKNYV

SEQ ID NO: 2 - protein, 261 aa, Homo sapiens
MSTTTCQVVAFLLSILGLAGCIAATGMDMWSTQDLYDNPVTSVFQYEGLWRSCVRQSSGFTECRPYFTILGLPAMLQAVRALMIVGIVLGAIGLLVSIFALKCIRIGSMEDSAKANMTLTSGIMFIVSGLCAIAGVSVFANMLVTNFWMSTANMYTGMGGMVQTVQTRYTFGAALFVGWVAGGLTLIGGVMMCIACRGLAPEETNYKAVSYHASGHSVAYKPGGFKASTGFGSNTKNKKIYDGGARTEDEVQSYPSKHDYV

SEQ ID NO: 3 - protein, 261 aa, Homo sapiens
MAVTACQGLGFVVSLIGIAGIIAATCMDQWSTQDLYNNPVTAVFNYQGLWRSCVRESSGFTECRGYFTLLGLPAMLQAVRALMIVGIVLGAIGLLVSIFALKCIRIGSMEDSAKANMTLTSGIMFIVSGLCAIAGVSVFANMLVTNFWMSTANMYTGMGGMVQTVQTRYTFGAALFVGWVAGGLTLIGGVMMCIACRGLAPEETNYKAVSYHASGHSVAYKPGGFKASTGFGSNTKNKKIYDGGARTEDEVQSYPSKHDYV

SEQ ID NO: 4 - protein, 211 aa, Homo sapiens
MANAGLQLLGFILAFLGWIGAIVSTALPQWRIYSYAGDNIVTAQAMYEGLWMSCVSQSTGQIQCKVFDSLLNLSSTLQATRALMVVGILLGVIAIFVATVGMKCMKCLEDDEVQKMRMAVIGGAIFLLAGLAILVATAWYGNRIVQEFYDPMTPVNARYEFGQALFTGWAAASLCLLGGALLCCSCPRKTTSYPTPRPYPKPAPSSGKDYV

SEQ ID NO: 5 - protein, 230 aa, Homo sapiens
MASLGLQLVGYILGLLGLLGTLVAMLLPSWKTSSYVGASIVTAVGFSKGLWMECATHSTGITQCDIYSTLLGLPADIQAAQAMMVTSSAISSLACIISVVGMRCTVFCQESRAKDRVAVAGGVFFILGGLLGFIPVAWNLHGILRDFYSPLVPDSMKFEIGEALYLGIISSLFSLIAGIILCFSCSSQRNRSNYYDAYQAQPLATRSSPRPGQPPKVKSEFNSYSLTGYV

SEQ ID NO: 6 - protein, 220 aa, Homo sapiens
MSMGLEITGTALAVLGWLGTIVCCALPMWRVSAFIGSNIITSQNIWEGLWMNCVVQSTGQMQCKVYDSLLALPQDLQAARALIVVAILLAAFGLLVALVGAQCTNCVQDDTAKAKITIVAGVLFLLAALLTLVPVSWSANTIIRDFYNPVVPEAQKREMGAGLYVGWAAAALQLLGGALLCCSCPPREKKYTATKVVYSAPRSTGPGASLGTGYDRKDYV

SEQ ID NO: 7 - protein, 209 aa, Homo sapiens
MASMGLQVMGIALAVLGWLAVMLCCALPMWRVTAFIGSNIVTSQTIWEGLWMNCVVQSTGQMQCKVYDSLLALPQDLQAARALVIISIIVAALGVLLSVVGGKCTNCLEDESAKAKTMIVAGVVFLLAGLMVIVPVSWTAHNIIQDFYNPLVASGQKREMGASLYVGWAASGLLLLGGGLLCCNCPPRTDKPYSAKYSAARSAAASNYV

SEQ ID NO: 8 - protein, 217 aa, Homo sapiens
MASTGLELLGMTLAVLGWLGTLVSCALPLWKVTAFIGNSIVVAQVVWEGLWMSCVVQSTGQMQCKVYDSLLALPQDLQAARALCVIALLLALLGLLVAITGAQCTTCVEDEGAKARIVLTAGVILLLAGILVLIPVCWTAHAIIQDFYNPLVAEALKRELGASLYLGWAAAALLMLGGGLLCCTCPPPQVERPRGPRLGYSIPSRSGASGLDKRDYV

SEQ ID NO: 9 - protein, 11 aa, Artificial
  E1A of CLDN-6
MWKVTAFIGNS

SEQ ID NO: 10 - protein, 10 aa, Artificial
  E2B of CLDN-6
LVAEAQKREL

SEQ ID NO: 11 - protein, 129 aa, Artificial
  VH of B6L
QVQLVQSGAEVKKPGASVKVSCKASGYTFTGYYMHWVRQAPGQCLEWMGWINPNSGETNYAQKFQGRVTMTRDTSISTAYMELSRLRSDDTAVYYCARDALIVVAPVTRDYYYYGMDVWGQGTTVTVSS

SEQ ID NO: 12 - protein, 108 aa, Artificial
  VL of B6L
EIVLTQSPGTLSLSPGERATLSCRASQSVSSSYLAWYQQKPGQAPRLLIYGASSRATGIPDRFSGSGSGTDFTLTISRLEPEDFAVYYCQQYGSSPLTFGCGTKLEIK

SEQ ID NO: 13 - protein, 5 aa, Artificial
  CDR-H1 of B6L
GYYMH

SEQ ID NO: 14 - protein, 17 aa, Artificial
  CDR-H2 of B6L
WINPNSGETNYAQKFQG

SEQ ID NO: 15 - protein, 20 aa, Artificial
  CDR-H3 of B6L
DALIVVAPVTRDYYYYGMDV

SEQ ID NO: 16 - protein, 12 aa, Artificial
  CDR-L1 of B6L
RASQSVSSSYLA

SEQ ID NO: 17 - protein, 7 aa, Artificial
  CDR-L2 of B6L
GASSRAT

SEQ ID NO: 18 - protein, 9 aa, Artificial
  CDR-L3 of B6L
QQYGSSPLT

SEQ ID NO: 19 - protein, 252 aa, Artificial
  B6L / scFv I2E
EIVLTQSPGTLSLSPGERATLSCRASQSVSSSYLAWYQQKPGQAPRLLIYGASSRATGIPDRFSGSGSGTDFTLTISRLEPEDFAVYYCQQYGSSPLTFGCGTKLEIKGGGGSGGGGSGGGGSQVQLVQSGAEVKKPGASVKVSCKASGYTFTGYYMHWVRQAPGQCLEWMGWINPNSGETNYAQKFQGRVTMTRDTSISTAYMELSRLRSDDTAVYYCARDALIVVAPVTRDYYYYGMDVWGQGTTVTVSS

SEQ ID NO: 20 - protein, 507 aa, Artificial
  B6L / bispecific MOL I2E
EIVLTQSPGTLSLSPGERATLSCRASQSVSSSYLAWYQQKPGQAPRLLIYGASSRATGIPDRFSGSGSGTDFTLTISRLEPEDFAVYYCQQYGSSPLTFGCGTKLEIKGGGGSGGGGSGGGGSQVQLVQSGAEVKKPGASVKVSCKASGYTFTGYYMHWVRQAPGQCLEWMGWINPNSGETNYAQKFQGRVTMTRDTSISTAYMELSRLRSDDTAVYYCARDALIVVAPVTRDYYYYGMDVWGQGTTVTVSSSGGGGSEVQLVESGGGLVQPGGSLKLSCAASGFTFNKYAINWVRQAPGKGLEWVARIRSKYNNYATYYADAVKDRFTISRDDSKNTVYLQMNNLKTEDTAVYYCARAGNFGSSYISYWAYWGQGTLVTVSSGGGGSGGGGSGGGGSQTVVTQEPSLTVSPGGTVTITCGSSTGAVTSGNYPNWVQKKPGQAPRGLIGGTKFLAPGTPARFSGSLSGGKAALTLSGVQPEDEAEYYCVLWYSNRWVFGSGTKLTVL

SEQ ID NO: 21 - protein, 985 aa, Artificial
  B6L / HLE-BITE I2E
EIVLTQSPGTLSLSPGERATLSCRASQSVSSSYLAWYQQKPGQAPRLLIYGASSRATGIPDRFSGSGSGTDFTLTISRLEPEDFAVYYCQQYGSSPLTFGCGTKLEIKGGGGSGGGGSGGGGSQVQLVQSGAEVKKPGASVKVSCKASGYTFTGYYMHWVRQAPGQCLEWMGWINPNSGETNYAQKFQGRVTMTRDTSISTAYMELSRLRSDDTAVYYCARDALIVVAPVTRDYYYYGMDVWGQGTTVTVSSSGGGGSLVQPGGSLKLSCAASGFTFNKYAINWVRQAPGKGLEWVARIRSKYNNYATYYADAVKDRFTISRDDSKNTVYLQMNNLKTEDTAVYYCARAGNFGSSYISYWAYWGQGTLVTVSSGGGGSGGGGSGGGGSQTVVTQEPSLTVSPGGTVTITCGSSTGAVTSGNYPNWVQKKPGQAPRGLIGGTKFLAPGTPARFSGSLSGGKAALTLSGVQPEDEAEYYCVLWYSNRWVFGSGTKLTVLGGGGDKTHTCPPCPAPELLGGPSVFLFPPKPKDTLMISRTPEVTCVVVDVSHEDPEVKFNWYVDGVEVHNAKTKPCEEQYGSTYRCVSVLTVLHQDWLNGKEYKCKVSNKALPAPIEKTISKAKGQPREPQVYTLPPSREEMTKNQVSLTCLVKGFYPSDIAVEWESNGQPENNYKTTPPVLDSDGSFFLYSKLTVDKSRWQQGNVFSCSVMHEALHNHYTQKSLSLSPGKGGGGSGGGGSGGGGSGGGGSGGGGSGGGGSDKTHTCPPCPAPELLGGPSVFLFPPKPKDTLMISRTPEVTCVVVDVSHEDPEVKFNWYVDGVEVHNAKTKPCEEQYGSTYRCVSVLTVLHQDWLNGKEYKCKVSNKALPAPIEKTISKAKGQPREPQVYTLPPSREEMTKNQVSLTCLVKGFYPSDIAVEWESNGQPENNYKTTPPVLDSDGSFFLYSKLTVDKSRWQQGNVFSCSVMHEALHNHYTQKSLSLSPGK

SEQ ID NO: 22 - protein, 252 aa, Artificial; identical to SEQ ID NO: 19
  B6L / scFv I2C

SEQ ID NO: 23 - protein, 507 aa, Artificial
  B6L / bispecific MOL I2C
EIVLTQSPGTLSLSPGERATLSCRASQSVSSSYLAWYQQKPGQAPRLLIYGASSRATGIPDRFSGSGSGTDFTLTISRLEPEDFAVYYCQQYGSSPLTFGCGTKLEIKGGGGSGGGGSGGGGSQVQLVQSGAEVKKPGASVKVSCKASGYTFTGYYMHWVRQAPGQCLEWMGWINPNSGETNYAQKFQGRVTMTRDTSISTAYMELSRLRSDDTAVYYCARDALIVVAPVTRDYYYYGMDVWGQGTTVTVSSSGGGGSEVQLVESGGGLVQPGGSLKLSCAASGFTFNKYAMNWVRQAPGKGLEWVARIRSKYNNYATYYADSVKDRFTISRDDSKNTAYLQMNNLKTEDTAVYYCVRHGNFGNSYISYWAYWGQGTLVTVSSGGGGSGGGGSGGGGSQTVVTQEPSLTVSPGGTVTLTCGSSTGAVTSGNYPNWVQQKPGQAPRGLIGGTKFLAPGTPARFSGSLLGGKAALTLSGVQPEDEAEYYCVLWYSNRWVFGGGTKLTVL

SEQ ID NO: 24 - protein, 995 aa, Artificial
  B6L / HLE BITE I2C
EIVLTQSPGTLSLSPGERATLSCRASQSVSSSYLAWYQQKPGQAPRLLIYGASSRATGIPDRFSGSGSGTDFTLTISRLEPEDFAVYYCQQYGSSPLTFGCGTKLEIKGGGGSGGGGSGGGGSQVQLVQSGAEVKKPGASVKVSCKASGYTFTGYYMHWVRQAPGQCLEWMGWINPNSGETNYAQKFQGRVTMTRDTSISTAYMELSRLRSDDTAVYYCARDALIVVAPVTRDYYYYGMDVWGQGTTVTVSSSGGGGSEVQLVESGGGLVQPGGSLKLSCAASGFTFNKYAMNWVRQAPGKGLEWVARIRSKYNNYATYYADSVKDRFTISRDDSKNTAYLQMNNLKTEDTAVYYCVRHGNFGNSYISYWAYWGQGTLVTVSSGGGGSGGGGSGGGGSQTVVTQEPSLTVSPGGTVTLTCGSSTGAVTSGNYPNWVQQKPGQAPRGLIGGTKFLAPGTPARFSGSLLGGKAALTLSGVQPEDEAEYYCVLWYSNRWVFGGGTKLTVLGGGGDKTHTCPPCPAPELLGGPSVFLFPPKPKDTLMISRTPEVTCVVVDVSHEDPEVKFNWYVDGVEVHNAKTKPCEEQYGSTYRCVSVLTVLHQDWLNGKEYKCKVSNKALPAPIEKTISKAKGQPREPQVYTLPPSREEMTKNQVSLTCLVKGFYPSDIAVEWESNGQPENNYKTTPPVLDSDGSFFLYSKLTVDKSRWQQGNVFSCSVMHEALHNHYTQKSLSLSPGKGGGGSGGGGSGGGGSGGGGSGGGGSGGGGSDKTHTCPPCPAPELLGGPSVFLFPPKPKDTLMISRTPEVTCVVVDVSHEDPEVKFNWYVDGVEVHNAKTKPCEEQYGSTYRCVSVLTVLHQDWLNGKEYKCKVSNKALPAPIEKTISKAKGQPREPQVYTLPPSREEMTKNQVSLTCLVKGFYPSDIAVEWESNGQPENNYKTTPPVLDSDGSFFLYSKLTVDKSRWQQGNVFSCSVMHEALHNHYTQKSLSLSPGK

SEQ ID NO: 25 - protein, 129 aa, Artificial
  VH of X3S
QVQLVQSGAEVKKPGASVKVSCKASGYTFTGYYVHWVRQAPGQCLEWMGWINPNSGATNYAQKFQGRVTMTRDTSISTAYMELSRLRSDDTAVYYCVRDALIVEAPATRDYYYYGMDVWGQGTTVTVSS

SEQ ID NO: 26 - protein, 108 aa, Artificial
  VL of X3S
EIVLTQSPGTLSLSPGERATLSCRASQSVRSTYLAWYQQKPGQAPRLLIYGASSRATGIPDRFSGSGSGTDFTLTISRLEPEDFAVYYCQQYDASPITFGCGTRLEIK

SEQ ID NO: 27 - protein, 5 aa, Artificial
  CDR-H1 of X3S
GYYVH

SEQ ID NO: 28 - protein, 17 aa, Artificial
  CDR-H2 of X3S
WINPNSGATNYAQKFQG

SEQ ID NO: 29 - protein, 20 aa, Artificial
  CDR-H3 of X3S
DALIVEAPATRDYYYYGMDV

SEQ ID NO: 30 - protein, 12 aa, Artificial
  CDR-L1 of X3S
RASQSVRSTYLA

SEQ ID NO: 31 - protein, 7 aa, Artificial
  CDR-L2 of X3S
GASSRAT

SEQ ID NO: 32 - protein, 9 aa, Artificial
  CDR-L3 of X3S
QQYDASPIT

SEQ ID NO: 33 - protein, 252 aa, Artificial
  X3S / scFv I2E
QVQLVQSGAEVKKPGASVKVSCKASGYTFTGYYVHWVRQAPGQCLEWMGWINPNSGATNYAQKFQGRVTMTRDTSISTAYMELSRLRSDDTAVYYCVRDALIVEAPATRDYYYYGMDVWGQGTTVTVSSGGGGSGGGGSGGGGSEIVLTQSPGTLSLSPGERATLSCRASQSVRSTYLAWYQQKPGQAPRLLIYGASSRATGIPDRFSGSGSGTDFTLTISRLEPEDFAVYYCQQYDASPITFGCGTRLEIK

SEQ ID NO: 34 - protein, 507 aa, Artificial
  X3S / bispecific MOL I2E
QVQLVQSGAEVKKPGASVKVSCKASGYTFTGYYVHWVRQAPGQCLEWMGWINPNSGATNYAQKFQGRVTMTRDTSISTAYMELSRLRSDDTAVYYCVRDALIVEAPATRDYYYYGMDVWGQGTTVTVSSGGGGSGGGGSGGGGSEIVLTQSPGTLSLSPGERATLSCRASQSVRSTYLAWYQQKPGQAPRLLIYGASSRATGIPDRFSGSGSGTDFTLTISRLEPEDFAVYYCQQYDASPITFGCGTRLEIKSGGGGSEVQLVESGGGLVQPGGSLKLSCAASGFTFNKYAINWVRQAPGKGLEWVARIRSKYNNYATYYADAVKDRFTISRDDSKNTVYLQMNNLKTEDTAVYYCARAGNFGSSYISYWAYWGQGTLVTVSSGGGGSGGGGSGGGGSQTVVTQEPSLTVSPGGTVTITCGSSTGAVTSGNYPNWVQKKPGQAPRGLIGGTKFLAPGTPARFSGSLSGGKAALTLSGVQPEDEAEYYCVLWYSNRWVFGSGTKLTVL

SEQ ID NO: 35 - protein, 995 aa, Artificial
  X3S / HLE BITE I2E
QVQLVQSGAEVKKPGASVKVSCKASGYTFTGYYVHWVRQAPGQCLEWMGWINPNSGATNYAQKFQGRVTMTRDTSISTAYMELSRLRSDDTAVYYCVRDALIVEAPATRDYYYYGMDVWGQGTTVTVSSGGGGSGGGGSGGGGSEIVLTQSPGTLSLSPGERATLSCRASQSVRSTYLAWYQQKPGQAPRLLIYGASSRATGIPDRFSGSGSGTDFTLTISRLEPEDFAVYYCQQYDASPITFGCGTRLEIKSGGGGSEVQLVESGGGLVQPGGSLKLSCAASGFTFNKYAINWVRQAPGKGLEWVARIRSKYNNYATYYADAVKDRFTISRDDSKNTVYLQMNNLKTEDTAVYYCARAGNFGSSYISYWAYWGQGTLVTVSSGGGGSGGGGSGGGGSQTVVTQEPSLTVSPGGTVTITCGSSTGAVTSGNYPNWVQKKPGQAPRGLIGGTKFLAPGTPARFSGSLSGGKAALTLSGVQPEDEAEYYCVLWYSNRWVFGSGTKLTVLGGGGDKTHTCPPCPAPELLGGPSVFLFPPKPKDTLMISRTPEVTCVVVDVSHEDPEVKFNWYVDGVEVHNAKTKPCEEQYGSTYRCVSVLTVLHQDWLNGKEYKCKVSNKALPAPIEKTISKAKGQPREPQVYTLPPSREEMTKNQVSLTCLVKGFYPSDIAVEWESNGQPENNYKTTPPVLDSDGSFFLYSKLTVDKSRWQQGNVFSCSVMHEALHNHYTQKSLSLSPGKGGGGSGGGGSGGGGSGGGGSGGGGSGGGGSDKTHTCPPCPAPELLGGPSVFLFPPKPKDTLMISRTPEVTCVVVDVSHEDPEVKFNWYVDGVEVHNAKTKPCEEQYGSTYRCVSVLTVLHQDWLNGKEYKCKVSNKALPAPIEKTISKAKGQPREPQVYTLPPSREEMTKNQVSLTCLVKGFYPSDIAVEWESNGQPENNYKTTPPVLDSDGSFFLYSKLTVDKSRWQQGNVFSCSVMHEALHNHYTQKSLSLSPGK

SEQ ID NO: 36 - protein, 252 aa, Artificial; identical to SEQ ID NO: 33
  X3S / scFv I2C

SEQ ID NO: 37 - protein, 507 aa, Artificial
  X3S / bispecific MOL I2C
QVQLVQSGAEVKKPGASVKVSCKASGYTFTGYYVHWVRQAPGQCLEWMGWINPNSGATNYAQKFQGRVTMTRDTSISTAYMELSRLRSDDTAVYYCVRDALIVEAPATRDYYYYGMDVWGQGTTVTVSSGGGGSGGGGSGGGGSEIVLTQSPGTLSLSPGERATLSCRASQSVRSTYLAWYQQKPGQAPRLLIYGASSRATGIPDRFSGSGSGTDFTLTISRLEPEDFAVYYCQQYDASPITFGCGTRLEIKSGGGGSEVQLVESGGGLVQPGGSLKLSCAASGFTFNKYAMNWVRQAPGKGLEWVARIRSKYNNYATYYADSVKDRFTISRDDSKNTAYLQMNNLKTEDTAVYYCVRHGNFGNSYISYWAYWGQGTLVTVSSGGGGSGGGGSGGGGSQTVVTQEPSLTVSPGGTVTLTCGSSTGAVTSGNYPNWVQQKPGQAPRGLIGGTKFLAPGTPARFSGSLLGGKAALTLSGVQPEDEAEYYCVLWYSNRWVFGGGTKLTVL

SEQ ID NO: 38 - protein, 995 aa, Artificial
  X3S / HLE BITE I2C
QVQLVQSGAEVKKPGASVKVSCKASGYTFTGYYVHWVRQAPGQCLEWMGWINPNSGATNYAQKFQGRVTMTRDTSISTAYMELSRLRSDDTAVYYCVRDALIVEAPATRDYYYYGMDVWGQGTTVTVSSGGGGSGGGGSGGGGSEIVLTQSPGTLSLSPGERATLSCRASQSVRSTYLAWYQQKPGQAPRLLIYGASSRATGIPDRFSGSGSGTDFTLTISRLEPEDFAVYYCQQYDASPITFGCGTRLEIKSGGGGSEVQLVESGGGLVQPGGSLKLSCAASGFTFNKYAMNWVRQAPGKGLEWVARIRSKYNNYATYYADSVKDRFTISRDDSKNTAYLQMNNLKTEDTAVYYCVRHGNFGNSYISYWAYWGQGTLVTVSSGGGGSGGGGSGGGGSQTVVTQEPSLTVSPGGTVTLTCGSSTGAVTSGNYPNWVQQKPGQAPRGLIGGTKFLAPGTPARFSGSLLGGKAALTLSGVQPEDEAEYYCVLWYSNRWVFGGGTKLTVLGGGGDKTHTCPPCPAPELLGGPSVFLFPPKPKDTLMISRTPEVTCVVVDVSHEDPEVKFNWYVDGVEVHNAKTKPCEEQYGSTYRCVSVLTVLHQDWLNGKEYKCKVSNKALPAPIEKTISKAKGQPREPQVYTLPPSREEMTKNQVSLTCLVKGFYPSDIAVEWESNGQPENNYKTTPPVLDSDGSFFLYSKLTVDKSRWQQGNVFSCSVMHEALHNHYTQKSLSLSPGKGGGGSGGGGSGGGGSGGGGSGGGGSGGGGSDKTHTCPPCPAPELLGGPSVFLFPPKPKDTLMISRTPEVTCVVVDVSHEDPEVKFNWYVDGVEVHNAKTKPCEEQYGSTYRCVSVLTVLHQDWLNGKEYKCKVSNKALPAPIEKTISKAKGQPREPQVYTLPPSREEMTKNQVSLTCLVKGFYPSDIAVEWESNGQPENNYKTTPPVLDSDGSFFLYSKLTVDKSRWQQGNVFSCSVMHEALHNHYTQKSLSLSPGK

SEQ ID NO: 39 - protein, 129 aa, Artificial
  VH of L4B
QVQLVQSGAEVKKPGASVKVSCKASGYTFTGYYVHWVRQAPGQCLEWMGWINPNSGATNYAQKFQGRVTMTRDTSISTAYMELSRLRSDDTAVYYCVRDRLIVEAPATRDYYYYGMDVWGQGTTVTVSS

SEQ ID NO: 40 - protein, 108 aa, Artificial; identical to SEQ ID NO: 26
  VL of L4B

SEQ ID NO: 41 - protein, 5 aa, Artificial
  CDR-H1 of L4B
GYYVH

SEQ ID NO: 42 - protein, 17 aa, Artificial
  CDR-H2 of L4B
WINPNSGATNYAQKFQG

SEQ ID NO: 43 - protein, 20 aa, Artificial
  CDR-H3 of L4B
DRLIVEAPATRDYYYYGMDV

SEQ ID NO: 44 - protein, 12 aa, Artificial
  CDR-L1 of L4B
RASQSVRSTYLA

SEQ ID NO: 45 - protein, 7 aa, Artificial
  CDR-L2 of L4B
GASSRAT

SEQ ID NO: 46 - protein, 9 aa, Artificial
  CDR-L3 of L4B
QQYDASPIT

SEQ ID NO: 47 - protein, 252 aa, Artificial
  L4B / scFv I2E
QVQLVQSGAEVKKPGASVKVSCKASGYTFTGYYVHWVRQAPGQCLEWMGWINPNSGATNYAQKFQGRVTMTRDTSISTAYMELSRLRSDDTAVYYCVRDRLIVEAPATRDYYYYGMDVWGQGTTVTVSSGGGGSGGGGSGGGGSEIVLTQSPGTLSLSPGERATLSCRASQSVRSTYLAWYQQKPGQAPRLLIYGASSRATGIPDRFSGSGSGTDFTLTISRLEPEDFAVYYCQQYDASPITFGCGTRLEIK

SEQ ID NO: 48 - protein, 507 aa, Artificial
  L4B / bispecific MOL I2E
QVQLVQSGAEVKKPGASVKVSCKASGYTFTGYYVHWVRQAPGQCLEWMGWINPNSGATNYAQKFQGRVTMTRDTSISTAYMELSRLRSDDTAVYYCVRDRLIVEAPATRDYYYYGMDVWGQGTTVTVSSGGGGSGGGGSGGGGSEIVLTQSPGTLSLSPGERATLSCRASQSVRSTYLAWYQQKPGQAPRLLIYGASSRATGIPDRFSGSGSGTDFTLTISRLEPEDFAVYYCQQYDASPITFGCGTRLEIKSGGGGSEVQLVESGGGLVQPGGSLKLSCAASGFTFNKYAINWVRQAPGKGLEWVARIRSKYNNYATYYADAVKDRFTISRDDSKNTVYLQMNNLKTEDTAVYYCARAGNFGSSYISYWAYWGQGTLVTVSSGGGGSGGGGSGGGGSQTVVTQEPSLTVSPGGTVTITCGSSTGAVTSGNYPNWVQKKPGQAPRGLIGGTKFLAPGTPARFSGSLSGGKAALTLSGVQPEDEAEYYCVLWYSNRWVFGSGTKLTVL

SEQ ID NO: 49 - protein, 995 aa, Artificial
  L4B / HLE BITE I2E
QVQLVQSGAEVKKPGASVKVSCKASGYTFTGYYVHWVRQAPGQCLEWMGWINPNSGATNYAQKFQGRVTMTRDTSISTAYMELSRLRSDDTAVYYCVRDRLIVEAPATRDYYYYGMDVWGQGTTVTVSSGGGGSGGGGSGGGGSEIVLTQSPGTLSLSPGERATLSCRASQSVRSTYLAWYQQKPGQAPRLLIYGASSRATGIPDRFSGSGSGTDFTLTISRLEPEDFAVYYCQQYDASPITFGCGTRLEIKSGGGGSEVQLVESGGGLVQPGGSLKLSCAASGFTFNKYAINWVRQAPGKGLEWVARIRSKYNNYATYYADAVKDRFTISRDDSKNTVYLQMNNLKTEDTAVYYCARAGNFGSSYISYWAYWGQGTLVTVSSGGGGSGGGGSGGGGSQTVVTQEPSLTVSPGGTVTITCGSSTGAVTSGNYPNWVQKKPGQAPRGLIGGTKFLAPGTPARFSGSLSGGKAALTLSGVQPEDEAEYYCVLWYSNRWVFGSGTKLTVLGGGGDKTHTCPPCPAPELLGGPSVFLFPPKPKDTLMISRTPEVTCVVVDVSHEDPEVKFNWYVDGVEVHNAKTKPCEEQYGSTYRCVSVLTVLHQDWLNGKEYKCKVSNKALPAPIEKTISKAKGQPREPQVYTLPPSREEMTKNQVSLTCLVKGFYPSDIAVEWESNGQPENNYKTTPPVLDSDGSFFLYSKLTVDKSRWQQGNVFSCSVMHEALHNHYTQKSLSLSPGKGGGGSGGGGSGGGGSGGGGSGGGGSGGGGSDKTHTCPPCPAPELLGGPSVFLFPPKPKDTLMISRTPEVTCVVVDVSHEDPEVKFNWYVDGVEVHNAKTKPCEEQYGSTYRCVSVLTVLHQDWLNGKEYKCKVSNKALPAPIEKTISKAKGQPREPQVYTLPPSREEMTKNQVSLTCLVKGFYPSDIAVEWESNGQPENNYKTTPPVLDSDGSFFLYSKLTVDKSRWQQGNVFSCSVMHEALHNHYTQKSLSLSPGK

SEQ ID NO: 50 - protein, 252 aa, Artificial; identical to SEQ ID NO: 47
  L4B / scFv I2C

SEQ ID NO: 51 - protein, 507 aa, Artificial
  L4B / bispecific MOL I2C
QVQLVQSGAEVKKPGASVKVSCKASGYTFTGYYVHWVRQAPGQCLEWMGWINPNSGATNYAQKFQGRVTMTRDTSISTAYMELSRLRSDDTAVYYCVRDRLIVEAPATRDYYYYGMDVWGQGTTVTVSSGGGGSGGGGSGGGGSEIVLTQSPGTLSLSPGERATLSCRASQSVRSTYLAWYQQKPGQAPRLLIYGASSRATGIPDRFSGSGSGTDFTLTISRLEPEDFAVYYCQQYDASPITFGCGTRLEIKSGGGGSEVQLVESGGGLVQPGGSLKLSCAASGFTFNKYAMNWVRQAPGKGLEWVARIRSKYNNYATYYADSVKDRFTISRDDSKNTAYLQMNNLKTEDTAVYYCVRHGNFGNSYISYWAYWGQGTLVTVSSGGGGSGGGGSGGGGSQTVVTQEPSLTVSPGGTVTLTCGSSTGAVTSGNYPNWVQQKPGQAPRGLIGGTKFLAPGTPARFSGSLLGGKAALTLSGVQPEDEAEYYCVLWYSNRWVFGGGTKLTVL

SEQ ID NO: 52 - protein, 995 aa, Artificial
  L4B / HLE BITE I2C
QVQLVQSGAEVKKPGASVKVSCKASGYTFTGYYVHWVRQAPGQCLEWMGWINPNSGATNYAQKFQGRVTMTRDTSISTAYMELSRLRSDDTAVYYCVRDRLIVEAPATRDYYYYGMDVWGQGTTVTVSSGGGGSGGGGSGGGGSEIVLTQSPGTLSLSPGERATLSCRASQSVRSTYLAWYQQKPGQAPRLLIYGASSRATGIPDRFSGSGSGTDFTLTISRLEPEDFAVYYCQQYDASPITFGCGTRLEIKSGGGGSEVQLVESGGGLVQPGGSLKLSCAASGFTFNKYAMNWVRQAPGKGLEWVARIRSKYNNYATYYADSVKDRFTISRDDSKNTAYLQMNNLKTEDTAVYYCVRHGNFGNSYISYWAYWGQGTLVTVSSGGGGSGGGGSGGGGSQTVVTQEPSLTVSPGGTVTLTCGSSTGAVTSGNYPNWVQQKPGQAPRGLIGGTKFLAPGTPARFSGSLLGGKAALTLSGVQPEDEAEYYCVLWYSNRWVFGGGTKLTVLGGGGDKTHTCPPCPAPELLGGPSVFLFPPKPKDTLMISRTPEVTCVVVDVSHEDPEVKFNWYVDGVEVHNAKTKPCEEQYGSTYRCVSVLTVLHQDWLNGKEYKCKVSNKALPAPIEKTISKAKGQPREPQVYTLPPSREEMTKNQVSLTCLVKGFYPSDIAVEWESNGQPENNYKTTPPVLDSDGSFFLYSKLTVDKSRWQQGNVFSCSVMHEALHNHYTQKSLSLSPGKGGGGSGGGGSGGGGSGGGGSGGGGSGGGGSDKTHTCPPCPAPELLGGPSVFLFPPKPKDTLMISRTPEVTCVVVDVSHEDPEVKFNWYVDGVEVHNAKTKPCEEQYGSTYRCVSVLTVLHQDWLNGKEYKCKVSNKALPAPIEKTISKAKGQPREPQVYTLPPSREEMTKNQVSLTCLVKGFYPSDIAVEWESNGQPENNYKTTPPVLDSDGSFFLYSKLTVDKSRWQQGNVFSCSVMHEALHNHYTQKSLSLSPGK

SEQ ID NO: 53 - protein, 129 aa, Artificial
  VH of I2P
QVQLVQSGAEVKKPGASVKVSCKASGYTFTGYYVHWVRQAPGQCLEWMGWINPNSGATNYAQKFQGRVTMTRDTSISTAYMELSRLRSVDTAVYYCVRDALIVEAPATRDYYYYGMDVWGQGTTVTVSS

SEQ ID NO: 54 - protein, 109 aa, Artificial
  VL of I2P
EIVLTQSPGTLSLSPGERATLSCRASQSVRSTYLAWYQQKPGQAPRLLISGASSRATGIPDRFSGSGSGTDFTLTISRLEPEDFAVYYCQQYDASPITFGCGTRLEIKS

SEQ ID NO: 55 - protein, 5 aa, Artificial
  CDR-H1 of I2P
GYYVH

SEQ ID NO: 56 - protein, 17 aa, Artificial
  CDR-H2 of I2P
WINPNSGATNYAQKFQG

SEQ ID NO: 57 - protein, 20 aa, Artificial
  CDR-H3 of I2P
DALIVEAPATRDYYYYGMDV

SEQ ID NO: 58 - protein, 12 aa, Artificial
  CDR-L1 of I2P
RASQSVRSTYLA

SEQ ID NO: 59 - protein, 7 aa, Artificial
  CDR-L2 of I2P
GASSRAT

SEQ ID NO: 60 - protein, 9 aa, Artificial
  CDR-L3 of I2P
QQYDASPIT

SEQ ID NO: 61 - protein, 253 aa, Artificial
  I2P / scFv of I2E
QVQLVQSGAEVKKPGASVKVSCKASGYTFTGYYVHWVRQAPGQCLEWMGWINPNSGATNYAQKFQGRVTMTRDTSISTAYMELSRLRSVDTAVYYCVRDALIVEAPATRDYYYYGMDVWGQGTTVTVSSGGGGSGGGGSGGGGSEIVLTQSPGTLSLSPGERATLSCRASQSVRSTYLAWYQQKPGQAPRLLISGASSRATGIPDRFSGSGSGTDFTLTISRLEPEDFAVYYCQQYDASPITFGCGTRLEIKS

SEQ ID NO: 62 - protein, 508 aa, Artificial
  I2P / bispecific MOL I2E
QVQLVQSGAEVKKPGASVKVSCKASGYTFTGYYVHWVRQAPGQCLEWMGWINPNSGATNYAQKFQGRVTMTRDTSISTAYMELSRLRSVDTAVYYCVRDALIVEAPATRDYYYYGMDVWGQGTTVTVSSGGGGSGGGGSGGGGSEIVLTQSPGTLSLSPGERATLSCRASQSVRSTYLAWYQQKPGQAPRLLISGASSRATGIPDRFSGSGSGTDFTLTISRLEPEDFAVYYCQQYDASPITFGCGTRLEIKSSGGGGSEVQLVESGGGLVQPGGSLKLSCAASGFTFNKYAINWVRQAPGKGLEWVARIRSKYNNYATYYADAVKDRFTISRDDSKNTVYLQMNNLKTEDTAVYYCARAGNFGSSYISYWAYWGQGTLVTVSSGGGGSGGGGSGGGGSQTVVTQEPSLTVSPGGTVTITCGSSTGAVTSGNYPNWVQKKPGQAPRGLIGGTKFLAPGTPARFSGSLSGGKAALTLSGVQPEDEAEYYCVLWYSNRWVFGSGTKLTVL

SEQ ID NO: 63 - protein, 996 aa, Artificial
  I2P / HLE BITE I2E
QVQLVQSGAEVKKPGASVKVSCKASGYTFTGYYVHWVRQAPGQCLEWMGWINPNSGATNYAQKFQGRVTMTRDTSISTAYMELSRLRSVDTAVYYCVRDALIVEAPATRDYYYYGMDVWGQGTTVTVSSGGGGSGGGGSGGGGSEIVLTQSPGTLSLSPGERATLSCRASQSVRSTYLAWYQQKPGQAPRLLISGASSRATGIPDRFSGSGSGTDFTLTISRLEPEDFAVYYCQQYDASPITFGCGTRLEIKSSGGGGSEVQLVESGGGLVQPGGSLKLSCAASGFTFNKYAINWVRQAPGKGLEWVARIRSKYNNYATYYADAVKDRFTISRDDSKNTVYLQMNNLKTEDTAVYYCARAGNFGSSYISYWAYWGQGTLVTVSSGGGGSGGGGSGGGGSQTVVTQEPSLTVSPGGTVTITCGSSTGAVTSGNYPNWVQKKPGQAPRGLIGGTKFLAPGTPARFSGSLSGGKAALTLSGVQPEDEAEYYCVLWYSNRWVFGSGTKLTVLGGGGDKTHTCPPCPAPELLGGPSVFLFPPKPKDTLMISRTPEVTCVVVDVSHEDPEVKFNWYVDGVEVHNAKTKPCEEQYGSTYRCVSVLTVLHQDWLNGKEYKCKVSNKALPAPIEKTISKAKGQPREPQVYTLPPSREEMTKNQVSLTCLVKGFYPSDIAVEWESNGQPENNYKTTPPVLDSDGSFFLYSKLTVDKSRWQQGNVFSCSVMHEALHNHYTQKSLSLSPGKGGGGSGGGGSGGGGSGGGGSGGGGSGGGGSDKTHTCPPCPAPELLGGPSVFLFPPKPKDTLMISRTPEVTCVVVDVSHEDPEVKFNWYVDGVEVHNAKTKPCEEQYGSTYRCVSVLTVLHQDWLNGKEYKCKVSNKALPAPIEKTISKAKGQPREPQVYTLPPSREEMTKNQVSLTCLVKGFYPSDIAVEWESNGQPENNYKTTPPVLDSDGSFFLYSKLTVDKSRWQQGNVFSCSVMHEALHNHYTQKSLSLSPGK

SEQ ID NO: 64 - protein, 252 aa, Artificial
  I2P / scFv I2C
QVQLVQSGAEVKKPGASVKVSCKASGYTFTGYYVHWVRQAPGQCLEWMGWINPNSGATNYAQKFQGRVTMTRDTSISTAYMELSRLRSVDTAVYYCVRDALIVEAPATRDYYYYGMDVWGQGTTVTVSSGGGGSGGGGSGGGGSEIVLTQSPGTLSLSPGERATLSCRASQSVRSTYLAWYQQKPGQAPRLLISGASSRATGIPDRFSGSGSGTDFTLTISRLEPEDFAVYYCQQYDASPITFGCGTRLEIK

SEQ ID NO: 65 - protein, 507 aa, Artificial
  I2P / bispecific MOL I2C
QVQLVQSGAEVKKPGASVKVSCKASGYTFTGYYVHWVRQAPGQCLEWMGWINPNSGATNYAQKFQGRVTMTRDTSISTAYMELSRLRSVDTAVYYCVRDALIVEAPATRDYYYYGMDVWGQGTTVTVSSGGGGSGGGGSGGGGSEIVLTQSPGTLSLSPGERATLSCRASQSVRSTYLAWYQQKPGQAPRLLISGASSRATGIPDRFSGSGSGTDFTLTISRLEPEDFAVYYCQQYDASPITFGCGTRLEIKSGGGGSEVQLVESGGGLVQPGGSLKLSCAASGFTFNKYAMNWVRQAPGKGLEWVARIRSKYNNYATYYADSVKDRFTISRDDSKNTAYLQMNNLKTEDTAVYYCVRHGNFGNSYISYWAYWGQGTLVTVSSGGGGSGGGGSGGGGSQTVVTQEPSLTVSPGGTVTLTCGSSTGAVTSGNYPNWVQQKPGQAPRGLIGGTKFLAPGTPARFSGSLLGGKAALTLSGVQPEDEAEYYCVLWYSNRWVFGGGTKLTVL

SEQ ID NO: 66 - protein, 995 aa, Artificial
  I2P / HLE BITE I2C
QVQLVQSGAEVKKPGASVKVSCKASGYTFTGYYVHWVRQAPGQCLEWMGWINPNSGATNYAQKFQGRVTMTRDTSISTAYMELSRLRSVDTAVYYCVRDALIVEAPATRDYYYYGMDVWGQGTTVTVSSGGGGSGGGGSGGGGSEIVLTQSPGTLSLSPGERATLSCRASQSVRSTYLAWYQQKPGQAPRLLISGASSRATGIPDRFSGSGSGTDFTLTISRLEPEDFAVYYCQQYDASPITFGCGTRLEIKSGGGGSEVQLVESGGGLVQPGGSLKLSCAASGFTFNKYAMNWVRQAPGKGLEWVARIRSKYNNYATYYADSVKDRFTISRDDSKNTAYLQMNNLKTEDTAVYYCVRHGNFGNSYISYWAYWGQGTLVTVSSGGGGSGGGGSGGGGSQTVVTQEPSLTVSPGGTVTLTCGSSTGAVTSGNYPNWVQQKPGQAPRGLIGGTKFLAPGTPARFSGSLLGGKAALTLSGVQPEDEAEYYCVLWYSNRWVFGGGTKLTVLGGGGDKTHTCPPCPAPELLGGPSVFLFPPKPKDTLMISRTPEVTCVVVDVSHEDPEVKFNWYVDGVEVHNAKTKPCEEQYGSTYRCVSVLTVLHQDWLNGKEYKCKVSNKALPAPIEKTISKAKGQPREPQVYTLPPSREEMTKNQVSLTCLVKGFYPSDIAVEWESNGQPENNYKTTPPVLDSDGSFFLYSKLTVDKSRWQQGNVFSCSVMHEALHNHYTQKSLSLSPGKGGGGSGGGGSGGGGSGGGGSGGGGSGGGGSDKTHTCPPCPAPELLGGPSVFLFPPKPKDTLMISRTPEVTCVVVDVSHEDPEVKFNWYVDGVEVHNAKTKPCEEQYGSTYRCVSVLTVLHQDWLNGKEYKCKVSNKALPAPIEKTISKAKGQPREPQVYTLPPSREEMTKNQVSLTCLVKGFYPSDIAVEWESNGQPENNYKTTPPVLDSDGSFFLYSKLTVDKSRWQQGNVFSCSVMHEALHNHYTQKSLSLSPGK

SEQ ID NO: 67 - protein, 129 aa, Artificial; identical to SEQ ID NO: 53
  VH of S3N

SEQ ID NO: 68 - protein, 108 aa, Artificial
  VL of S3N
EIVLTQSPGTLSLSPGERATLSCRASQSVRSTYLAWYQQKPGQAPRLLISGASSRATGIPDRFSGSGSGTDFTLTISRLEPEDFAVYYCQQYQTSPITFGCGTRLEIK

SEQ ID NO: 69 - protein, 5 aa, Artificial
  CDR-H1 of S3N
GYYVH

SEQ ID NO: 70 - protein, 17 aa, Artificial
  CDR-H2 of S3N
WINPNSGATNYAQKFQG

SEQ ID NO: 71 - protein, 20 aa, Artificial
  CDR-H3 of S3N
DALIVEAPATRDYYYYGMDV

SEQ ID NO: 72 - protein, 12 aa, Artificial
  CDR-L1 of S3N
RASQSVRSTYLA

SEQ ID NO: 73 - protein, 7 aa, Artificial
  CDR-L2 of S3N
GASSRAT

SEQ ID NO: 74 - protein, 9 aa, Artificial
  CDR-L3 of S3N
QQYQTSPIT

SEQ ID NO: 75 - protein, 252 aa, Artificial
  S3N / scFv I2E
QVQLVQSGAEVKKPGASVKVSCKASGYTFTGYYVHWVRQAPGQCLEWMGWINPNSGATNYAQKFQGRVTMTRDTSISTAYMELSRLRSVDTAVYYCVRDALIVEAPATRDYYYYGMDVWGQGTTVTVSSGGGGSGGGGSGGGGSEIVLTQSPGTLSLSPGERATLSCRASQSVRSTYLAWYQQKPGQAPRLLISGASSRATGIPDRFSGSGSGTDFTLTISRLEPEDFAVYYCQQYQTSPITFGCGTRLEIK

SEQ ID NO: 76 - protein, 507 aa, Artificial
  S3N / bispecific MOL I2E
QVQLVQSGAEVKKPGASVKVSCKASGYTFTGYYVHWVRQAPGQCLEWMGWINPNSGATNYAQKFQGRVTMTRDTSISTAYMELSRLRSVDTAVYYCVRDALIVEAPATRDYYYYGMDVWGQGTTVTVSSGGGGSGGGGSGGGGSEIVLTQSPGTLSLSPGERATLSCRASQSVRSTYLAWYQQKPGQAPRLLISGASSRATGIPDRFSGSGSGTDFTLTISRLEPEDFAVYYCQQYQTSPITFGCGTRLEIKSGGGGSEVQLVESGGGLVQPGGSLKLSCAASGFTFNKYAINWVRQAPGKGLEWVARIRSKYNNYATYYADAVKDRFTISRDDSKNTVYLQMNNLKTEDTAVYYCARAGNFGSSYISYWAYWGQGTLVTVSSGGGGSGGGGSGGGGSQTVVTQEPSLTVSPGGTVTITCGSSTGAVTSGNYPNWVQKKPGQAPRGLIGGTKFLAPGTPARFSGSLSGGKAALTLSGVQPEDEAEYYCVLWYSNRWVFGSGTKLTVL

SEQ ID NO: 77 - protein, 995 aa, Artificial
  S3N / HLE BITE I2E
QVQLVQSGAEVKKPGASVKVSCKASGYTFTGYYVHWVRQAPGQCLEWMGWINPNSGATNYAQKFQGRVTMTRDTSISTAYMELSRLRSVDTAVYYCVRDALIVEAPATRDYYYYGMDVWGQGTTVTVSSGGGGSGGGGSGGGGSEIVLTQSPGTLSLSPGERATLSCRASQSVRSTYLAWYQQKPGQAPRLLISGASSRATGIPDRFSGSGSGTDFTLTISRLEPEDFAVYYCQQYQTSPITFGCGTRLEIKSGGGGSEVQLVESGGGLVQPGGSLKLSCAASGFTFNKYAINWVRQAPGKGLEWVARIRSKYNNYATYYADAVKDRFTISRDDSKNTVYLQMNNLKTEDTAVYYCARAGNFGSSYISYWAYWGQGTLVTVSSGGGGSGGGGSGGGGSQTVVTQEPSLTVSPGGTVTITCGSSTGAVTSGNYPNWVQKKPGQAPRGLIGGTKFLAPGTPARFSGSLSGGKAALTLSGVQPEDEAEYYCVLWYSNRWVFGSGTKLTVLGGGGDKTHTCPPCPAPELLGGPSVFLFPPKPKDTLMISRTPEVTCVVVDVSHEDPEVKFNWYVDGVEVHNAKTKPCEEQYGSTYRCVSVLTVLHQDWLNGKEYKCKVSNKALPAPIEKTISKAKGQPREPQVYTLPPSREEMTKNQVSLTCLVKGFYPSDIAVEWESNGQPENNYKTTPPVLDSDGSFFLYSKLTVDKSRWQQGNVFSCSVMHEALHNHYTQKSLSLSPGKGGGGSGGGGSGGGGSGGGGSGGGGSGGGGSDKTHTCPPCPAPELLGGPSVFLFPPKPKDTLMISRTPEVTCVVVDVSHEDPEVKFNWYVDGVEVHNAKTKPCEEQYGSTYRCVSVLTVLHQDWLNGKEYKCKVSNKALPAPIEKTISKAKGQPREPQVYTLPPSREEMTKNQVSLTCLVKGFYPSDIAVEWESNGQPENNYKTTPPVLDSDGSFFLYSKLTVDKSRWQQGNVFSCSVMHEALHNHYTQKSLSLSPGK

SEQ ID NO: 78 - protein, 252 aa, Artificial; identical to SEQ ID NO: 75
  S3N / scFv I2C

SEQ ID NO: 79 - protein, 507 aa, Artificial
  S3N / bispecific MOL I2C
QVQLVQSGAEVKKPGASVKVSCKASGYTFTGYYVHWVRQAPGQCLEWMGWINPNSGATNYAQKFQGRVTMTRDTSISTAYMELSRLRSVDTAVYYCVRDALIVEAPATRDYYYYGMDVWGQGTTVTVSSGGGGSGGGGSGGGGSEIVLTQSPGTLSLSPGERATLSCRASQSVRSTYLAWYQQKPGQAPRLLISGASSRATGIPDRFSGSGSGTDFTLTISRLEPEDFAVYYCQQYQTSPITFGCGTRLEIKSGGGGSEVQLVESGGGLVQPGGSLKLSCAASGFTFNKYAMNWVRQAPGKGLEWVARIRSKYNNYATYYADSVKDRFTISRDDSKNTAYLQMNNLKTEDTAVYYCVRHGNFGNSYISYWAYWGQGTLVTVSSGGGGSGGGGSGGGGSQTVVTQEPSLTVSPGGTVTLTCGSSTGAVTSGNYPNWVQQKPGQAPRGLIGGTKFLAPGTPARFSGSLLGGKAALTLSGVQPEDEAEYYCVLWYSNRWVFGGGTKLTVL

SEQ ID NO: 80 - protein, 995 aa, Artificial
  S3N / HLE BITE I2C
QVQLVQSGAEVKKPGASVKVSCKASGYTFTGYYVHWVRQAPGQCLEWMGWINPNSGATNYAQKFQGRVTMTRDTSISTAYMELSRLRSVDTAVYYCVRDALIVEAPATRDYYYYGMDVWGQGTTVTVSSGGGGSGGGGSGGGGSEIVLTQSPGTLSLSPGERATLSCRASQSVRSTYLAWYQQKPGQAPRLLISGASSRATGIPDRFSGSGSGTDFTLTISRLEPEDFAVYYCQQYQTSPITFGCGTRLEIKSGGGGSEVQLVESGGGLVQPGGSLKLSCAASGFTFNKYAMNWVRQAPGKGLEWVARIRSKYNNYATYYADSVKDRFTISRDDSKNTAYLQMNNLKTEDTAVYYCVRHGNFGNSYISYWAYWGQGTLVTVSSGGGGSGGGGSGGGGSQTVVTQEPSLTVSPGGTVTLTCGSSTGAVTSGNYPNWVQQKPGQAPRGLIGGTKFLAPGTPARFSGSLLGGKAALTLSGVQPEDEAEYYCVLWYSNRWVFGGGTKLTVLGGGGDKTHTCPPCPAPELLGGPSVFLFPPKPKDTLMISRTPEVTCVVVDVSHEDPEVKFNWYVDGVEVHNAKTKPCEEQYGSTYRCVSVLTVLHQDWLNGKEYKCKVSNKALPAPIEKTISKAKGQPREPQVYTLPPSREEMTKNQVSLTCLVKGFYPSDIAVEWESNGQPENNYKTTPPVLDSDGSFFLYSKLTVDKSRWQQGNVFSCSVMHEALHNHYTQKSLSLSPGKGGGGSGGGGSGGGGSGGGGSGGGGSGGGGSDKTHTCPPCPAPELLGGPSVFLFPPKPKDTLMISRTPEVTCVVVDVSHEDPEVKFNWYVDGVEVHNAKTKPCEEQYGSTYRCVSVLTVLHQDWLNGKEYKCKVSNKALPAPIEKTISKAKGQPREPQVYTLPPSREEMTKNQVSLTCLVKGFYPSDIAVEWESNGQPENNYKTTPPVLDSDGSFFLYSKLTVDKSRWQQGNVFSCSVMHEALHNHYTQKSLSLSPGK

SEQ ID NO: 81 - protein, 129 aa, Artificial
  VH of H7I
QVQLVQSGAEVKKPGASVKVSCKASGYTFTGYYVHWVRQAPGQCLEWMGWINPNSGATNYAQKFQGRVTMTRDTSISTAYMELSRLRSVDTAVYYCVRDRLIVEAPATRDYYYYGMDVWGQGTTVTVSS

SEQ ID NO: 82 - protein, 108 aa, Artificial
  VL of H7I
EIVLTQSPGTLSLSPGERATLSCRASQSVRSTYLAWYQQTPGQAPRLLISGASSRATGIPDRFSGSGSGTDFILTISRLEPEDFAVYYCQQYDASPITFGCGTRLEIK

SEQ ID NO: 83 - protein, 5 aa, Artificial
  CDR-H1 of H7I
GYYVH

SEQ ID NO: 84 - protein, 17 aa, Artificial
  CDR-H2 of H7I
WINPNSGATNYAQKFQG

SEQ ID NO: 85 - protein, 20 aa, Artificial
  CDR-H3 of H7I
DRLIVEAPATRDYYYYGMDV

SEQ ID NO: 86 - protein, 12 aa, Artificial
  CDR-L1 of H7I
RASQSVRSTYLA

SEQ ID NO: 87 - protein, 7 aa, Artificial
  CDR-L2 of H7I
GASSRAT

SEQ ID NO: 88 - protein, 9 aa, Artificial
  CDR-L3 of H7I
QQYDASPIT

SEQ ID NO: 89 - protein, 252 aa, Artificial
  H7I / scFv I2E
QVQLVQSGAEVKKPGASVKVSCKASGYTFTGYYVHWVRQAPGQCLEWMGWINPNSGATNYAQKFQGRVTMTRDTSISTAYMELSRLRSVDTAVYYCVRDRLIVEAPATRDYYYYGMDVWGQGTTVTVSSGGGGSGGGGSGGGGSEIVLTQSPGTLSLSPGERATLSCRASQSVRSTYLAWYQQTPGQAPRLLISGASSRATGIPDRFSGSGSGTDFILTISRLEPEDFAVYYCQQYDASPITFGCGTRLEIK

SEQ ID NO: 90 - protein, 507 aa, Artificial
  H7I / bispecific MOL I2E
QVQLVQSGAEVKKPGASVKVSCKASGYTFTGYYVHWVRQAPGQCLEWMGWINPNSGATNYAQKFQGRVTMTRDTSISTAYMELSRLRSVDTAVYYCVRDRLIVEAPATRDYYYYGMDVWGQGTTVTVSSGGGGSGGGGSGGGGSEIVLTQSPGTLSLSPGERATLSCRASQSVRSTYLAWYQQTPGQAPRLLISGASSRATGIPDRFSGSGSGTDFILTISRLEPEDFAVYYCQQYDASPITFGCGTRLEIKSGGGGSEVQLVESGGGLVQPGGSLKLSCAASGFTFNKYAINWVRQAPGKGLEWVARIRSKYNNYATYYADAVKDRFTISRDDSKNTVYLQMNNLKTEDTAVYYCARAGNFGSSYISYWAYWGQGTLVTVSSGGGGSGGGGSGGGGSQTVVTQEPSLTVSPGGTVTITCGSSTGAVTSGNYPNWVQKKPGQAPRGLIGGTKFLAPGTPARFSGSLSGGKAALTLSGVQPEDEAEYYCVLWYSNRWVFGSGTKLTVL

SEQ ID NO: 91 - protein, 995 aa, Artificial
  H7I / HLE BITE I2E
QVQLVQSGAEVKKPGASVKVSCKASGYTFTGYYVHWVRQAPGQCLEWMGWINPNSGATNYAQKFQGRVTMTRDTSISTAYMELSRLRSVDTAVYYCVRDRLIVEAPATRDYYYYGMDVWGQGTTVTVSSGGGGSGGGGSGGGGSEIVLTQSPGTLSLSPGERATLSCRASQSVRSTYLAWYQQTPGQAPRLLISGASSRATGIPDRFSGSGSGTDFILTISRLEPEDFAVYYCQQYDASPITFGCGTRLEIKSGGGGSEVQLVESGGGLVQPGGSLKLSCAASGFTFNKYAINWVRQAPGKGLEWVARIRSKYNNYATYYADAVKDRFTISRDDSKNTVYLQMNNLKTEDTAVYYCARAGNFGSSYISYWAYWGQGTLVTVSSGGGGSGGGGSGGGGSQTVVTQEPSLTVSPGGTVTITCGSSTGAVTSGNYPNWVQKKPGQAPRGLIGGTKFLAPGTPARFSGSLSGGKAALTLSGVQPEDEAEYYCVLWYSNRWVFGSGTKLTVLGGGGDKTHTCPPCPAPELLGGPSVFLFPPKPKDTLMISRTPEVTCVVVDVSHEDPEVKFNWYVDGVEVHNAKTKPCEEQYGSTYRCVSVLTVLHQDWLNGKEYKCKVSNKALPAPIEKTISKAKGQPREPQVYTLPPSREEMTKNQVSLTCLVKGFYPSDIAVEWESNGQPENNYKTTPPVLDSDGSFFLYSKLTVDKSRWQQGNVFSCSVMHEALHNHYTQKSLSLSPGKGGGGSGGGGSGGGGSGGGGSGGGGSGGGGSDKTHTCPPCPAPELLGGPSVFLFPPKPKDTLMISRTPEVTCVVVDVSHEDPEVKFNWYVDGVEVHNAKTKPCEEQYGSTYRCVSVLTVLHQDWLNGKEYKCKVSNKALPAPIEKTISKAKGQPREPQVYTLPPSREEMTKNQVSLTCLVKGFYPSDIAVEWESNGQPENNYKTTPPVLDSDGSFFLYSKLTVDKSRWQQGNVFSCSVMHEALHNHYTQKSLSLSPGK

SEQ ID NO: 92 - protein, 252 aa, Artificial; identical to SEQ ID NO: 89
  H7I / scFv I2C

SEQ ID NO: 93 - protein, 507 aa, Artificial
  H7I / bispecific MOL I2C
QVQLVQSGAEVKKPGASVKVSCKASGYTFTGYYVHWVRQAPGQCLEWMGWINPNSGATNYAQKFQGRVTMTRDTSISTAYMELSRLRSVDTAVYYCVRDRLIVEAPATRDYYYYGMDVWGQGTTVTVSSGGGGSGGGGSGGGGSEIVLTQSPGTLSLSPGERATLSCRASQSVRSTYLAWYQQTPGQAPRLLISGASSRATGIPDRFSGSGSGTDFILTISRLEPEDFAVYYCQQYDASPITFGCGTRLEIKSGGGGSEVQLVESGGGLVQPGGSLKLSCAASGFTFNKYAMNWVRQAPGKGLEWVARIRSKYNNYATYYADSVKDRFTISRDDSKNTAYLQMNNLKTEDTAVYYCVRHGNFGNSYISYWAYWGQGTLVTVSSGGGGSGGGGSGGGGSQTVVTQEPSLTVSPGGTVTLTCGSSTGAVTSGNYPNWVQQKPGQAPRGLIGGTKFLAPGTPARFSGSLLGGKAALTLSGVQPEDEAEYYCVLWYSNRWVFGGGTKLTVL

SEQ ID NO: 94 - protein, 995 aa, Artificial
  H7I / HLE BITE I2C
QVQLVQSGAEVKKPGASVKVSCKASGYTFTGYYVHWVRQAPGQCLEWMGWINPNSGATNYAQKFQGRVTMTRDTSISTAYMELSRLRSVDTAVYYCVRDRLIVEAPATRDYYYYGMDVWGQGTTVTVSSGGGGSGGGGSGGGGSEIVLTQSPGTLSLSPGERATLSCRASQSVRSTYLAWYQQTPGQAPRLLISGASSRATGIPDRFSGSGSGTDFILTISRLEPEDFAVYYCQQYDASPITFGCGTRLEIKSGGGGSEVQLVESGGGLVQPGGSLKLSCAASGFTFNKYAMNWVRQAPGKGLEWVARIRSKYNNYATYYADSVKDRFTISRDDSKNTAYLQMNNLKTEDTAVYYCVRHGNFGNSYISYWAYWGQGTLVTVSSGGGGSGGGGSGGGGSQTVVTQEPSLTVSPGGTVTLTCGSSTGAVTSGNYPNWVQQKPGQAPRGLIGGTKFLAPGTPARFSGSLLGGKAALTLSGVQPEDEAEYYCVLWYSNRWVFGGGTKLTVLGGGGDKTHTCPPCPAPELLGGPSVFLFPPKPKDTLMISRTPEVTCVVVDVSHEDPEVKFNWYVDGVEVHNAKTKPCEEQYGSTYRCVSVLTVLHQDWLNGKEYKCKVSNKALPAPIEKTISKAKGQPREPQVYTLPPSREEMTKNQVSLTCLVKGFYPSDIAVEWESNGQPENNYKTTPPVLDSDGSFFLYSKLTVDKSRWQQGNVFSCSVMHEALHNHYTQKSLSLSPGKGGGGSGGGGSGGGGSGGGGSGGGGSGGGGSDKTHTCPPCPAPELLGGPSVFLFPPKPKDTLMISRTPEVTCVVVDVSHEDPEVKFNWYVDGVEVHNAKTKPCEEQYGSTYRCVSVLTVLHQDWLNGKEYKCKVSNKALPAPIEKTISKAKGQPREPQVYTLPPSREEMTKNQVSLTCLVKGFYPSDIAVEWESNGQPENNYKTTPPVLDSDGSFFLYSKLTVDKSRWQQGNVFSCSVMHEALHNHYTQKSLSLSPGK

SEQ ID NO: 95 - protein, 129 aa, Artificial; identical to SEQ ID NO: 81
  VH of J2I

SEQ ID NO: 96 - protein, 108 aa, Artificial
  VL of J2I
EIVLTQSPGTLSLSPGERATLSCRASQSVRSTYLAWYQQTPGQAPRLLISGASSRATGIPDRFSGSGSGTDFILTISRLEPEDFAVYYCQQYQTSPITFGCGTRLEIK

SEQ ID NO: 97 - protein, 5 aa, Artificial
  CDR-H1 of J2I
GYYVH

SEQ ID NO: 98 - protein, 17 aa, Artificial
  CDR-H2 of J2I
WINPNSGATNYAQKFQG

SEQ ID NO: 99 - protein, 20 aa, Artificial
  CDR-H3 of J2I
DRLIVEAPATRDYYYYGMDV

SEQ ID NO: 100 - protein, 12 aa, Artificial
  CDR-L1 of J2I
RASQSVRSTYLA

SEQ ID NO: 101 - protein, 7 aa, Artificial
  CDR-L2 of J2I
GASSRAT

SEQ ID NO: 102 - protein, 9 aa, Artificial
  CDR-L3 of J2I
QQYQTSPIT

SEQ ID NO: 103 - protein, 252 aa, Artificial
  J2I / scFv I2E
QVQLVQSGAEVKKPGASVKVSCKASGYTFTGYYVHWVRQAPGQCLEWMGWINPNSGATNYAQKFQGRVTMTRDTSISTAYMELSRLRSVDTAVYYCVRDRLIVEAPATRDYYYYGMDVWGQGTTVTVSSGGGGSGGGGSGGGGSEIVLTQSPGTLSLSPGERATLSCRASQSVRSTYLAWYQQTPGQAPRLLISGASSRATGIPDRFSGSGSGTDFILTISRLEPEDFAVYYCQQYQTSPITFGCGTRLEIK

SEQ ID NO: 104 - protein, 507 aa, Artificial
  J2I / bispecific MOL I2E
QVQLVQSGAEVKKPGASVKVSCKASGYTFTGYYVHWVRQAPGQCLEWMGWINPNSGATNYAQKFQGRVTMTRDTSISTAYMELSRLRSVDTAVYYCVRDRLIVEAPATRDYYYYGMDVWGQGTTVTVSSGGGGSGGGGSGGGGSEIVLTQSPGTLSLSPGERATLSCRASQSVRSTYLAWYQQTPGQAPRLLISGASSRATGIPDRFSGSGSGTDFILTISRLEPEDFAVYYCQQYQTSPITFGCGTRLEIKSGGGGSEVQLVESGGGLVQPGGSLKLSCAASGFTFNKYAINWVRQAPGKGLEWVARIRSKYNNYATYYADAVKDRFTISRDDSKNTVYLQMNNLKTEDTAVYYCARAGNFGSSYISYWAYWGQGTLVTVSSGGGGSGGGGSGGGGSQTVVTQEPSLTVSPGGTVTITCGSSTGAVTSGNYPNWVQKKPGQAPRGLIGGTKFLAPGTPARFSGSLSGGKAALTLSGVQPEDEAEYYCVLWYSNRWVFGSGTKLTVL

SEQ ID NO: 105 - protein, 995 aa, Artificial
  J2I / HLE BITE I2E
QVQLVQSGAEVKKPGASVKVSCKASGYTFTGYYVHWVRQAPGQCLEWMGWINPNSGATNYAQKFQGRVTMTRDTSISTAYMELSRLRSVDTAVYYCVRDRLIVEAPATRDYYYYGMDVWGQGTTVTVSSGGGGSGGGGSGGGGSEIVLTQSPGTLSLSPGERATLSCRASQSVRSTYLAWYQQTPGQAPRLLISGASSRATGIPDRFSGSGSGTDFILTISRLEPEDFAVYYCQQYQTSPITFGCGTRLEIKSGGGGSEVQLVESGGGLVQPGGSLKLSCAASGFTFNKYAINWVRQAPGKGLEWVARIRSKYNNYATYYADAVKDRFTISRDDSKNTVYLQMNNLKTEDTAVYYCARAGNFGSSYISYWAYWGQGTLVTVSSGGGGSGGGGSGGGGSQTVVTQEPSLTVSPGGTVTITCGSSTGAVTSGNYPNWVQKKPGQAPRGLIGGTKFLAPGTPARFSGSLSGGKAALTLSGVQPEDEAEYYCVLWYSNRWVFGSGTKLTVLGGGGDKTHTCPPCPAPELLGGPSVFLFPPKPKDTLMISRTPEVTCVVVDVSHEDPEVKFNWYVDGVEVHNAKTKPCEEQYGSTYRCVSVLTVLHQDWLNGKEYKCKVSNKALPAPIEKTISKAKGQPREPQVYTLPPSREEMTKNQVSLTCLVKGFYPSDIAVEWESNGQPENNYKTTPPVLDSDGSFFLYSKLTVDKSRWQQGNVFSCSVMHEALHNHYTQKSLSLSPGKGGGGSGGGGSGGGGSGGGGSGGGGSGGGGSDKTHTCPPCPAPELLGGPSVFLFPPKPKDTLMISRTPEVTCVVVDVSHEDPEVKFNWYVDGVEVHNAKTKPCEEQYGSTYRCVSVLTVLHQDWLNGKEYKCKVSNKALPAPIEKTISKAKGQPREPQVYTLPPSREEMTKNQVSLTCLVKGFYPSDIAVEWESNGQPENNYKTTPPVLDSDGSFFLYSKLTVDKSRWQQGNVFSCSVMHEALHNHYTQKSLSLSPGK

SEQ ID NO: 106 - protein, 252 aa, Artificial; identical to SEQ ID NO: 103
  J2I / scFv I2C

SEQ ID NO: 107 - protein, 507 aa, Artificial
  J2I / bispecific MOL I2C
QVQLVQSGAEVKKPGASVKVSCKASGYTFTGYYVHWVRQAPGQCLEWMGWINPNSGATNYAQKFQGRVTMTRDTSISTAYMELSRLRSVDTAVYYCVRDRLIVEAPATRDYYYYGMDVWGQGTTVTVSSGGGGSGGGGSGGGGSEIVLTQSPGTLSLSPGERATLSCRASQSVRSTYLAWYQQTPGQAPRLLISGASSRATGIPDRFSGSGSGTDFILTISRLEPEDFAVYYCQQYQTSPITFGCGTRLEIKSGGGGSEVQLVESGGGLVQPGGSLKLSCAASGFTFNKYAMNWVRQAPGKGLEWVARIRSKYNNYATYYADSVKDRFTISRDDSKNTAYLQMNNLKTEDTAVYYCVRHGNFGNSYISYWAYWGQGTLVTVSSGGGGSGGGGSGGGGSQTVVTQEPSLTVSPGGTVTLTCGSSTGAVTSGNYPNWVQQKPGQAPRGLIGGTKFLAPGTPARFSGSLLGGKAALTLSGVQPEDEAEYYCVLWYSNRWVFGGGTKLTVL

SEQ ID NO: 108 - protein, 995 aa, Artificial
  J2I / HLE BITE I2C
QVQLVQSGAEVKKPGASVKVSCKASGYTFTGYYVHWVRQAPGQCLEWMGWINPNSGATNYAQKFQGRVTMTRDTSISTAYMELSRLRSVDTAVYYCVRDRLIVEAPATRDYYYYGMDVWGQGTTVTVSSGGGGSGGGGSGGGGSEIVLTQSPGTLSLSPGERATLSCRASQSVRSTYLAWYQQTPGQAPRLLISGASSRATGIPDRFSGSGSGTDFILTISRLEPEDFAVYYCQQYQTSPITFGCGTRLEIKSGGGGSEVQLVESGGGLVQPGGSLKLSCAASGFTFNKYAMNWVRQAPGKGLEWVARIRSKYNNYATYYADSVKDRFTISRDDSKNTAYLQMNNLKTEDTAVYYCVRHGNFGNSYISYWAYWGQGTLVTVSSGGGGSGGGGSGGGGSQTVVTQEPSLTVSPGGTVTLTCGSSTGAVTSGNYPNWVQQKPGQAPRGLIGGTKFLAPGTPARFSGSLLGGKAALTLSGVQPEDEAEYYCVLWYSNRWVFGGGTKLTVLGGGGDKTHTCPPCPAPELLGGPSVFLFPPKPKDTLMISRTPEVTCVVVDVSHEDPEVKFNWYVDGVEVHNAKTKPCEEQYGSTYRCVSVLTVLHQDWLNGKEYKCKVSNKALPAPIEKTISKAKGQPREPQVYTLPPSREEMTKNQVSLTCLVKGFYPSDIAVEWESNGQPENNYKTTPPVLDSDGSFFLYSKLTVDKSRWQQGNVFSCSVMHEALHNHYTQKSLSLSPGKGGGGSGGGGSGGGGSGGGGSGGGGSGGGGSDKTHTCPPCPAPELLGGPSVFLFPPKPKDTLMISRTPEVTCVVVDVSHEDPEVKFNWYVDGVEVHNAKTKPCEEQYGSTYRCVSVLTVLHQDWLNGKEYKCKVSNKALPAPIEKTISKAKGQPREPQVYTLPPSREEMTKNQVSLTCLVKGFYPSDIAVEWESNGQPENNYKTTPPVLDSDGSFFLYSKLTVDKSRWQQGNVFSCSVMHEALHNHYTQKSLSLSPGK

SEQ ID NO: 109 - protein, 129 aa, Artificial; identical to SEQ ID NO: 53
  VH of A4K

SEQ ID NO: 110 - protein, 108 aa, Artificial; identical to SEQ ID NO: 82
  VL of A4K

SEQ ID NO: 111 - protein, 5 aa, Artificial
  CDR-H1 of A4K
GYYVH

SEQ ID NO: 112 - protein, 17 aa, Artificial
  CDR-H2 of A4K
WINPNSGATNYAQKFQG

SEQ ID NO: 113 - protein, 20 aa, Artificial
  CDR-H3 of A4K
DALIVEAPATRDYYYYGMDV

SEQ ID NO: 114 - protein, 12 aa, Artificial
  CDR-L1 of A4K
RASQSVRSTYLA

SEQ ID NO: 115 - protein, 7 aa, Artificial Sequence
  CDR-L2 of A4K
GASSRAT

SEQ ID NO: 116 - protein, 9 aa, Artificial
  CDR-L3 of A4K
QQYDASPIT

SEQ ID NO: 117 - protein, 252 aa, Artificial
  A4K / scFv I2E
QVQLVQSGAEVKKPGASVKVSCKASGYTFTGYYVHWVRQAPGQCLEWMGWINPNSGATNYAQKFQGRVTMTRDTSISTAYMELSRLRSVDTAVYYCVRDALIVEAPATRDYYYYGMDVWGQGTTVTVSSGGGGSGGGGSGGGGSEIVLTQSPGTLSLSPGERATLSCRASQSVRSTYLAWYQQTPGQAPRLLISGASSRATGIPDRFSGSGSGTDFILTISRLEPEDFAVYYCQQYDASPITFGCGTRLEIK

SEQ ID NO: 118 - protein, 507 aa, Artificial
  A4K / bispecific MOL I2E
QVQLVQSGAEVKKPGASVKVSCKASGYTFTGYYVHWVRQAPGQCLEWMGWINPNSGATNYAQKFQGRVTMTRDTSISTAYMELSRLRSVDTAVYYCVRDALIVEAPATRDYYYYGMDVWGQGTTVTVSSGGGGSGGGGSGGGGSEIVLTQSPGTLSLSPGERATLSCRASQSVRSTYLAWYQQTPGQAPRLLISGASSRATGIPDRFSGSGSGTDFILTISRLEPEDFAVYYCQQYDASPITFGCGTRLEIKSGGGGSEVQLVESGGGLVQPGGSLKLSCAASGFTFNKYAINWVRQAPGKGLEWVARIRSKYNNYATYYADAVKDRFTISRDDSKNTVYLQMNNLKTEDTAVYYCARAGNFGSSYISYWAYWGQGTLVTVSSGGGGSGGGGSGGGGSQTVVTQEPSLTVSPGGTVTITCGSSTGAVTSGNYPNWVQKKPGQAPRGLIGGTKFLAPGTPARFSGSLSGGKAALTLSGVQPEDEAEYYCVLWYSNRWVFGSGTKLTVL

SEQ ID NO: 119 - protein, 995 aa, Artificial
  A4K / HLE-BITE I2E
QVQLVQSGAEVKKPGASVKVSCKASGYTFTGYYVHWVRQAPGQCLEWMGWINPNSGATNYAQKFQGRVTMTRDTSISTAYMELSRLRSVDTAVYYCVRDALIVEAPATRDYYYYGMDVWGQGTTVTVSSGGGGSGGGGSGGGGSEIVLTQSPGTLSLSPGERATLSCRASQSVRSTYLAWYQQTPGQAPRLLISGASSRATGIPDRFSGSGSGTDFILTISRLEPEDFAVYYCQQYDASPITFGCGTRLEIKSGGGGSEVQLVESGGGLVQPGGSLKLSCAASGFTFNKYAINWVRQAPGKGLEWVARIRSKYNNYATYYADAVKDRFTISRDDSKNTVYLQMNNLKTEDTAVYYCARAGNFGSSYISYWAYWGQGTLVTVSSGGGGSGGGGSGGGGSQTVVTQEPSLTVSPGGTVTITCGSSTGAVTSGNYPNWVQKKPGQAPRGLIGGTKFLAPGTPARFSGSLSGGKAALTLSGVQPEDEAEYYCVLWYSNRWVFGSGTKLTVLGGGGDKTHTCPPCPAPELLGGPSVFLFPPKPKDTLMISRTPEVTCVVVDVSHEDPEVKFNWYVDGVEVHNAKTKPCEEQYGSTYRCVSVLTVLHQDWLNGKEYKCKVSNKALPAPIEKTISKAKGQPREPQVYTLPPSREEMTKNQVSLTCLVKGFYPSDIAVEWESNGQPENNYKTTPPVLDSDGSFFLYSKLTVDKSRWQQGNVFSCSVMHEALHNHYTQKSLSLSPGKGGGGSGGGGSGGGGSGGGGSGGGGSGGGGSDKTHTCPPCPAPELLGGPSVFLFPPKPKDTLMISRTPEVTCVVVDVSHEDPEVKFNWYVDGVEVHNAKTKPCEEQYGSTYRCVSVLTVLHQDWLNGKEYKCKVSNKALPAPIEKTISKAKGQPREPQVYTLPPSREEMTKNQVSLTCLVKGFYPSDIAVEWESNGQPENNYKTTPPVLDSDGSFFLYSKLTVDKSRWQQGNVFSCSVMHEALHNHYTQKSLSLSPGK

SEQ ID NO: 120 - protein, 252 aa, Artificial; identical to SEQ ID NO: 117
  A4K / scFv I2C

SEQ ID NO: 121 - protein, 507 aa, Artificial
  A4K / bispecific MOL I2C
QVQLVQSGAEVKKPGASVKVSCKASGYTFTGYYVHWVRQAPGQCLEWMGWINPNSGATNYAQKFQGRVTMTRDTSISTAYMELSRLRSVDTAVYYCVRDALIVEAPATRDYYYYGMDVWGQGTTVTVSSGGGGSGGGGSGGGGSEIVLTQSPGTLSLSPGERATLSCRASQSVRSTYLAWYQQTPGQAPRLLISGASSRATGIPDRFSGSGSGTDFILTISRLEPEDFAVYYCQQYDASPITFGCGTRLEIKSGGGGSEVQLVESGGGLVQPGGSLKLSCAASGFTFNKYAMNWVRQAPGKGLEWVARIRSKYNNYATYYADSVKDRFTISRDDSKNTAYLQMNNLKTEDTAVYYCVRHGNFGNSYISYWAYWGQGTLVTVSSGGGGSGGGGSGGGGSQTVVTQEPSLTVSPGGTVTLTCGSSTGAVTSGNYPNWVQQKPGQAPRGLIGGTKFLAPGTPARFSGSLLGGKAALTLSGVQPEDEAEYYCVLWYSNRWVFGGGTKLTVL

SEQ ID NO: 122 - protein, 995 aa, Artificial
  A4K / HLE BITE I2C
QVQLVQSGAEVKKPGASVKVSCKASGYTFTGYYVHWVRQAPGQCLEWMGWINPNSGATNYAQKFQGRVTMTRDTSISTAYMELSRLRSVDTAVYYCVRDALIVEAPATRDYYYYGMDVWGQGTTVTVSSGGGGSGGGGSGGGGSEIVLTQSPGTLSLSPGERATLSCRASQSVRSTYLAWYQQTPGQAPRLLISGASSRATGIPDRFSGSGSGTDFILTISRLEPEDFAVYYCQQYDASPITFGCGTRLEIKSGGGGSEVQLVESGGGLVQPGGSLKLSCAASGFTFNKYAMNWVRQAPGKGLEWVARIRSKYNNYATYYADSVKDRFTISRDDSKNTAYLQMNNLKTEDTAVYYCVRHGNFGNSYISYWAYWGQGTLVTVSSGGGGSGGGGSGGGGSQTVVTQEPSLTVSPGGTVTLTCGSSTGAVTSGNYPNWVQQKPGQAPRGLIGGTKFLAPGTPARFSGSLLGGKAALTLSGVQPEDEAEYYCVLWYSNRWVFGGGTKLTVLGGGGDKTHTCPPCPAPELLGGPSVFLFPPKPKDTLMISRTPEVTCVVVDVSHEDPEVKFNWYVDGVEVHNAKTKPCEEQYGSTYRCVSVLTVLHQDWLNGKEYKCKVSNKALPAPIEKTISKAKGQPREPQVYTLPPSREEMTKNQVSLTCLVKGFYPSDIAVEWESNGQPENNYKTTPPVLDSDGSFFLYSKLTVDKSRWQQGNVFSCSVMHEALHNHYTQKSLSLSPGKGGGGSGGGGSGGGGSGGGGSGGGGSGGGGSDKTHTCPPCPAPELLGGPSVFLFPPKPKDTLMISRTPEVTCVVVDVSHEDPEVKFNWYVDGVEVHNAKTKPCEEQYGSTYRCVSVLTVLHQDWLNGKEYKCKVSNKALPAPIEKTISKAKGQPREPQVYTLPPSREEMTKNQVSLTCLVKGFYPSDIAVEWESNGQPENNYKTTPPVLDSDGSFFLYSKLTVDKSRWQQGNVFSCSVMHEALHNHYTQKSLSLSPGK

SEQ ID NO: 123 - protein, 129 aa, Artificial; identical to SEQ ID NO: 53
  VH of E5B

SEQ ID NO: 124 - protein, 108 aa, Artificial; identical to SEQ ID NO: 96
  VL of E5B

SEQ ID NO: 125 - protein, 5 aa, Artificial
  CDR-H1 of E5B
GYYVH

SEQ ID NO: 126 - protein, 17 aa, Artificial
  CDR-H2 of E5B
WINPNSGATNYAQKFQG

SEQ ID NO: 127 - protein, 20 aa, Artificial
  CDR-H3 of E5B
DALIVEAPATRDYYYYGMDV

SEQ ID NO: 128 - protein, 12 aa, Artificial
  CDR-L1 of E5B
RASQSVRSTYLA

SEQ ID NO: 129 - protein, 7 aa, Artificial
  CDR-L2 of E5B
GASSRAT

SEQ ID NO: 130 - protein, 9 aa, Artificial
  CDR-L3 of E5B
QQYQTSPIT

SEQ ID NO: 131 - protein, 252 aa, Artificial
  E5B / scFv I2E
QVQLVQSGAEVKKPGASVKVSCKASGYTFTGYYVHWVRQAPGQCLEWMGWINPNSGATNYAQKFQGRVTMTRDTSISTAYMELSRLRSVDTAVYYCVRDALIVEAPATRDYYYYGMDVWGQGTTVTVSSGGGGSGGGGSGGGGSEIVLTQSPGTLSLSPGERATLSCRASQSVRSTYLAWYQQTPGQAPRLLISGASSRATGIPDRFSGSGSGTDFILTISRLEPEDFAVYYCQQYQTSPITFGCGTRLEIK

SEQ ID NO: 132 - protein, 507 aa, Artificial
  E5B / bispecific MOL I2E
QVQLVQSGAEVKKPGASVKVSCKASGYTFTGYYVHWVRQAPGQCLEWMGWINPNSGATNYAQKFQGRVTMTRDTSISTAYMELSRLRSVDTAVYYCVRDALIVEAPATRDYYYYGMDVWGQGTTVTVSSGGGGSGGGGSGGGGSEIVLTQSPGTLSLSPGERATLSCRASQSVRSTYLAWYQQTPGQAPRLLISGASSRATGIPDRFSGSGSGTDFILTISRLEPEDFAVYYCQQYQTSPITFGCGTRLEIKSGGGGSEVQLVESGGGLVQPGGSLKLSCAASGFTFNKYAINWVRQAPGKGLEWVARIRSKYNNYATYYADAVKDRFTISRDDSKNTVYLQMNNLKTEDTAVYYCARAGNFGSSYISYWAYWGQGTLVTVSSGGGGSGGGGSGGGGSQTVVTQEPSLTVSPGGTVTITCGSSTGAVTSGNYPNWVQKKPGQAPRGLIGGTKFLAPGTPARFSGSLSGGKAALTLSGVQPEDEAEYYCVLWYSNRWVFGSGTKLTVL

SEQ ID NO: 133 - protein, 995 aa, Artificial
  E5B / HLE-BITE I2E
QVQLVQSGAEVKKPGASVKVSCKASGYTFTGYYVHWVRQAPGQCLEWMGWINPNSGATNYAQKFQGRVTMTRDTSISTAYMELSRLRSVDTAVYYCVRDALIVEAPATRDYYYYGMDVWGQGTTVTVSSGGGGSGGGGSGGGGSEIVLTQSPGTLSLSPGERATLSCRASQSVRSTYLAWYQQTPGQAPRLLISGASSRATGIPDRFSGSGSGTDFILTISRLEPEDFAVYYCQQYQTSPITFGCGTRLEIKSGGGGSEVQLVESGGGLVQPGGSLKLSCAASGFTFNKYAINWVRQAPGKGLEWVARIRSKYNNYATYYADAVKDRFTISRDDSKNTVYLQMNNLKTEDTAVYYCARAGNFGSSYISYWAYWGQGTLVTVSSGGGGSGGGGSGGGGSQTVVTQEPSLTVSPGGTVTITCGSSTGAVTSGNYPNWVQKKPGQAPRGLIGGTKFLAPGTPARFSGSLSGGKAALTLSGVQPEDEAEYYCVLWYSNRWVFGSGTKLTVLGGGGDKTHTCPPCPAPELLGGPSVFLFPPKPKDTLMISRTPEVTCVVVDVSHEDPEVKFNWYVDGVEVHNAKTKPCEEQYGSTYRCVSVLTVLHQDWLNGKEYKCKVSNKALPAPIEKTISKAKGQPREPQVYTLPPSREEMTKNQVSLTCLVKGFYPSDIAVEWESNGQPENNYKTTPPVLDSDGSFFLYSKLTVDKSRWQQGNVFSCSVMHEALHNHYTQKSLSLSPGKGGGGSGGGGSGGGGSGGGGSGGGGSGGGGSDKTHTCPPCPAPELLGGPSVFLFPPKPKDTLMISRTPEVTCVVVDVSHEDPEVKFNWYVDGVEVHNAKTKPCEEQYGSTYRCVSVLTVLHQDWLNGKEYKCKVSNKALPAPIEKTISKAKGQPREPQVYTLPPSREEMTKNQVSLTCLVKGFYPSDIAVEWESNGQPENNYKTTPPVLDSDGSFFLYSKLTVDKSRWQQGNVFSCSVMHEALHNHYTQKSLSLSPGK

SEQ ID NO: 134 - protein, 252 aa, Artificial; identical to SEQ ID NO: 131
  E5B / scFv I2C

SEQ ID NO: 135 - protein, 507 aa, Artificial
  E5B / bispecific MOL I2C
QVQLVQSGAEVKKPGASVKVSCKASGYTFTGYYVHWVRQAPGQCLEWMGWINPNSGATNYAQKFQGRVTMTRDTSISTAYMELSRLRSVDTAVYYCVRDALIVEAPATRDYYYYGMDVWGQGTTVTVSSGGGGSGGGGSGGGGSEIVLTQSPGTLSLSPGERATLSCRASQSVRSTYLAWYQQTPGQAPRLLISGASSRATGIPDRFSGSGSGTDFILTISRLEPEDFAVYYCQQYQTSPITFGCGTRLEIKSGGGGSEVQLVESGGGLVQPGGSLKLSCAASGFTFNKYAMNWVRQAPGKGLEWVARIRSKYNNYATYYADSVKDRFTISRDDSKNTAYLQMNNLKTEDTAVYYCVRHGNFGNSYISYWAYWGQGTLVTVSSGGGGSGGGGSGGGGSQTVVTQEPSLTVSPGGTVTLTCGSSTGAVTSGNYPNWVQQKPGQAPRGLIGGTKFLAPGTPARFSGSLLGGKAALTLSGVQPEDEAEYYCVLWYSNRWVFGGGTKLTVL

SEQ ID NO: 136 - protein, 995 aa, Artificial
  E5B / HLE BITE I2C
QVQLVQSGAEVKKPGASVKVSCKASGYTFTGYYVHWVRQAPGQCLEWMGWINPNSGATNYAQKFQGRVTMTRDTSISTAYMELSRLRSVDTAVYYCVRDALIVEAPATRDYYYYGMDVWGQGTTVTVSSGGGGSGGGGSGGGGSEIVLTQSPGTLSLSPGERATLSCRASQSVRSTYLAWYQQTPGQAPRLLISGASSRATGIPDRFSGSGSGTDFILTISRLEPEDFAVYYCQQYQTSPITFGCGTRLEIKSGGGGSEVQLVESGGGLVQPGGSLKLSCAASGFTFNKYAMNWVRQAPGKGLEWVARIRSKYNNYATYYADSVKDRFTISRDDSKNTAYLQMNNLKTEDTAVYYCVRHGNFGNSYISYWAYWGQGTLVTVSSGGGGSGGGGSGGGGSQTVVTQEPSLTVSPGGTVTLTCGSSTGAVTSGNYPNWVQQKPGQAPRGLIGGTKFLAPGTPARFSGSLLGGKAALTLSGVQPEDEAEYYCVLWYSNRWVFGGGTKLTVLGGGGDKTHTCPPCPAPELLGGPSVFLFPPKPKDTLMISRTPEVTCVVVDVSHEDPEVKFNWYVDGVEVHNAKTKPCEEQYGSTYRCVSVLTVLHQDWLNGKEYKCKVSNKALPAPIEKTISKAKGQPREPQVYTLPPSREEMTKNQVSLTCLVKGFYPSDIAVEWESNGQPENNYKTTPPVLDSDGSFFLYSKLTVDKSRWQQGNVFSCSVMHEALHNHYTQKSLSLSPGKGGGGSGGGGSGGGGSGGGGSGGGGSGGGGSDKTHTCPPCPAPELLGGPSVFLFPPKPKDTLMISRTPEVTCVVVDVSHEDPEVKFNWYVDGVEVHNAKTKPCEEQYGSTYRCVSVLTVLHQDWLNGKEYKCKVSNKALPAPIEKTISKAKGQPREPQVYTLPPSREEMTKNQVSLTCLVKGFYPSDIAVEWESNGQPENNYKTTPPVLDSDGSFFLYSKLTVDKSRWQQGNVFSCSVMHEALHNHYTQKSLSLSPGK

SEQ ID NO: 137 - protein, 129 aa, Artificial; identical to SEQ ID NO: 53
  VH of RBB

SEQ ID NO: 138 - protein, 108 aa, Artificial
  VL of RBB
EIVLTQSPGTLSLSPGERATLSCRASQSVRSTYLAWYQQKPGQAPRLLIIGASSRATGIPDRFSGSGSGTDFTLTISRLEPEDFAVYYCQQYDASPITFGCGTRLEIK

SEQ ID NO: 139 - protein, 5 aa, Artificial
  CDR-H1 of RBB
GYYVH

SEQ ID NO: 140 - protein, 17 aa, Artificial
  CDR-H2 of RBB
WINPNSGATNYAQKFQG

SEQ ID NO: 141 - protein, 20 aa, Artificial
  CDR-H3 of RBB
DALIVEAPATRDYYYYGMDV

SEQ ID NO: 142 - protein, 12 aa, Artificial
  CDR-L1 of RBB
RASQSVRSTYLA

SEQ ID NO: 143 - protein, 7 aa, Artificial
  CDR-L2 of RBB
GASSRAT

SEQ ID NO: 144 - protein, 9 aa, Artificial
  CDR-L3 of RBB
QQYDASPIT

SEQ ID NO: 145 - protein, 252 aa, Artificial
  RBB / scFv I2E
QVQLVQSGAEVKKPGASVKVSCKASGYTFTGYYVHWVRQAPGQCLEWMGWINPNSGATNYAQKFQGRVTMTRDTSISTAYMELSRLRSVDTAVYYCVRDALIVEAPATRDYYYYGMDVWGQGTTVTVSSGGGGSGGGGSGGGGSEIVLTQSPGTLSLSPGERATLSCRASQSVRSTYLAWYQQKPGQAPRLLIIGASSRATGIPDRFSGSGSGTDFTLTISRLEPEDFAVYYCQQYDASPITFGCGTRLEIK

SEQ ID NO: 146 - protein, 507 aa, Artificial
  RBB / bispecific MOL I2E
QVQLVQSGAEVKKPGASVKVSCKASGYTFTGYYVHWVRQAPGQCLEWMGWINPNSGATNYAQKFQGRVTMTRDTSISTAYMELSRLRSVDTAVYYCVRDALIVEAPATRDYYYYGMDVWGQGTTVTVSSGGGGSGGGGSGGGGSEIVLTQSPGTLSLSPGERATLSCRASQSVRSTYLAWYQQKPGQAPRLLIIGASSRATGIPDRFSGSGSGTDFTLTISRLEPEDFAVYYCQQYDASPITFGCGTRLEIKSGGGGSEVQLVESGGGLVQPGGSLKLSCAASGFTFNKYAINWVRQAPGKGLEWVARIRSKYNNYATYYADAVKDRFTISRDDSKNTVYLQMNNLKTEDTAVYYCARAGNFGSSYISYWAYWGQGTLVTVSSGGGGSGGGGSGGGGSQTVVTQEPSLTVSPGGTVTITCGSSTGAVTSGNYPNWVQKKPGQAPRGLIGGTKFLAPGTPARFSGSLSGGKAALTLSGVQPEDEAEYYCVLWYSNRWVFGSGTKLTVL

SEQ ID NO: 147 - protein, 995 aa, Artificial
  RBB / HLE-BITE I2E
QVQLVQSGAEVKKPGASVKVSCKASGYTFTGYYVHWVRQAPGQCLEWMGWINPNSGATNYAQKFQGRVTMTRDTSISTAYMELSRLRSVDTAVYYCVRDALIVEAPATRDYYYYGMDVWGQGTTVTVSSGGGGSGGGGSGGGGSEIVLTQSPGTLSLSPGERATLSCRASQSVRSTYLAWYQQKPGQAPRLLIIGASSRATGIPDRFSGSGSGTDFTLTISRLEPEDFAVYYCQQYDASPITFGCGTRLEIKSGGGGSEVQLVESGGGLVQPGGSLKLSCAASGFTFNKYAINWVRQAPGKGLEWVARIRSKYNNYATYYADAVKDRFTISRDDSKNTVYLQMNNLKTEDTAVYYCARAGNFGSSYISYWAYWGQGTLVTVSSGGGGSGGGGSGGGGSQTVVTQEPSLTVSPGGTVTITCGSSTGAVTSGNYPNWVQKKPGQAPRGLIGGTKFLAPGTPARFSGSLSGGKAALTLSGVQPEDEAEYYCVLWYSNRWVFGSGTKLTVLGGGGDKTHTCPPCPAPELLGGPSVFLFPPKPKDTLMISRTPEVTCVVVDVSHEDPEVKFNWYVDGVEVHNAKTKPCEEQYGSTYRCVSVLTVLHQDWLNGKEYKCKVSNKALPAPIEKTISKAKGQPREPQVYTLPPSREEMTKNQVSLTCLVKGFYPSDIAVEWESNGQPENNYKTTPPVLDSDGSFFLYSKLTVDKSRWQQGNVFSCSVMHEALHNHYTQKSLSLSPGKGGGGSGGGGSGGGGSGGGGSGGGGSGGGGSDKTHTCPPCPAPELLGGPSVFLFPPKPKDTLMISRTPEVTCVVVDVSHEDPEVKFNWYVDGVEVHNAKTKPCEEQYGSTYRCVSVLTVLHQDWLNGKEYKCKVSNKALPAPIEKTISKAKGQPREPQVYTLPPSREEMTKNQVSLTCLVKGFYPSDIAVEWESNGQPENNYKTTPPVLDSDGSFFLYSKLTVDKSRWQQGNVFSCSVMHEALHNHYTQKSLSLSPGK

SEQ ID NO: 148 - protein, 252 aa, Artificial Sequence; identical to SEQ ID NO: 145
  RBB / scFv I2C

SEQ ID NO: 149 - protein, 507 aa, Artificial
  RBB / bispecific MOL I2C
QVQLVQSGAEVKKPGASVKVSCKASGYTFTGYYVHWVRQAPGQCLEWMGWINPNSGATNYAQKFQGRVTMTRDTSISTAYMELSRLRSVDTAVYYCVRDALIVEAPATRDYYYYGMDVWGQGTTVTVSSGGGGSGGGGSGGGGSEIVLTQSPGTLSLSPGERATLSCRASQSVRSTYLAWYQQKPGQAPRLLIIGASSRATGIPDRFSGSGSGTDFTLTISRLEPEDFAVYYCQQYDASPITFGCGTRLEIKSGGGGSEVQLVESGGGLVQPGGSLKLSCAASGFTFNKYAMNWVRQAPGKGLEWVARIRSKYNNYATYYADSVKDRFTISRDDSKNTAYLQMNNLKTEDTAVYYCVRHGNFGNSYISYWAYWGQGTLVTVSSGGGGSGGGGSGGGGSQTVVTQEPSLTVSPGGTVTLTCGSSTGAVTSGNYPNWVQQKPGQAPRGLIGGTKFLAPGTPARFSGSLLGGKAALTLSGVQPEDEAEYYCVLWYSNRWVFGGGTKLTVL

SEQ ID NO: 150 - protein, 995 aa, Artificial
  RBB / HLE BITE I2C
QVQLVQSGAEVKKPGASVKVSCKASGYTFTGYYVHWVRQAPGQCLEWMGWINPNSGATNYAQKFQGRVTMTRDTSISTAYMELSRLRSVDTAVYYCVRDALIVEAPATRDYYYYGMDVWGQGTTVTVSSGGGGSGGGGSGGGGSEIVLTQSPGTLSLSPGERATLSCRASQSVRSTYLAWYQQKPGQAPRLLIIGASSRATGIPDRFSGSGSGTDFTLTISRLEPEDFAVYYCQQYDASPITFGCGTRLEIKSGGGGSEVQLVESGGGLVQPGGSLKLSCAASGFTFNKYAMNWVRQAPGKGLEWVARIRSKYNNYATYYADSVKDRFTISRDDSKNTAYLQMNNLKTEDTAVYYCVRHGNFGNSYISYWAYWGQGTLVTVSSGGGGSGGGGSGGGGSQTVVTQEPSLTVSPGGTVTLTCGSSTGAVTSGNYPNWVQQKPGQAPRGLIGGTKFLAPGTPARFSGSLLGGKAALTLSGVQPEDEAEYYCVLWYSNRWVFGGGTKLTVLGGGGDKTHTCPPCPAPELLGGPSVFLFPPKPKDTLMISRTPEVTCVVVDVSHEDPEVKFNWYVDGVEVHNAKTKPCEEQYGSTYRCVSVLTVLHQDWLNGKEYKCKVSNKALPAPIEKTISKAKGQPREPQVYTLPPSREEMTKNQVSLTCLVKGFYPSDIAVEWESNGQPENNYKTTPPVLDSDGSFFLYSKLTVDKSRWQQGNVFSCSVMHEALHNHYTQKSLSLSPGKGGGGSGGGGSGGGGSGGGGSGGGGSGGGGSDKTHTCPPCPAPELLGGPSVFLFPPKPKDTLMISRTPEVTCVVVDVSHEDPEVKFNWYVDGVEVHNAKTKPCEEQYGSTYRCVSVLTVLHQDWLNGKEYKCKVSNKALPAPIEKTISKAKGQPREPQVYTLPPSREEMTKNQVSLTCLVKGFYPSDIAVEWESNGQPENNYKTTPPVLDSDGSFFLYSKLTVDKSRWQQGNVFSCSVMHEALHNHYTQKSLSLSPGK

SEQ ID NO: 151 - protein, 129 aa, Artificial
  VH of IX9
QVQLVQSGAEVKKPGASVKVSCKASGYTFTGYYMHWVRQAPGQCLEWMGWINPNSGETNYAQKFQGRVTMTRDTSISTAYMELSRLRSDDTAVYYCARDALIVVAPVTRDYYYYGMDVWGQGTTVTASS

SEQ ID NO: 152 - protein, 108 aa, Artificial
  VL of IX9
EIVLTQSPGTLSLSPGERATLSCRASQTVSSSYLVWYQQKPGQAPRLLIYGASSRATGIPDRFSGSGSGTDFTLTISRLEPEDFAVYYCQQYGGSPITFGCGTRLEIK

SEQ ID NO: 153 - protein, 5 aa, Artificial
  CDR-H1 of IX9
GYYMH

SEQ ID NO: 154 - protein, 17 aa, Artificial Sequence
  CDR-H2 of IX9
WINPNSGETNYAQKFQG

SEQ ID NO: 155 - protein, 20 aa, Artificial
  CDR-H3 of IX9
DALIVVAPVTRDYYYYGMDV

SEQ ID NO: 156 - protein, 12 aa, Artificial
  CDR-L1 of IX9
RASQTVSSSYLV

SEQ ID NO: 157 - protein, 7 aa, Artificial
  CDR-L2 of IX9
GASSRAT

SEQ ID NO: 158 - protein, 9 aa, Artificial
  CDR-L3 of IX9
QQYGGSPIT

SEQ ID NO: 159 - protein, 252 aa, Artificial
  IX9 / scFv I2E
EIVLTQSPGTLSLSPGERATLSCRASQTVSSSYLVWYQQKPGQAPRLLIYGASSRATGIPDRFSGSGSGTDFTLTISRLEPEDFAVYYCQQYGGSPITFGCGTRLEIKGGGGSGGGGSGGGGSQVQLVQSGAEVKKPGASVKVSCKASGYTFTGYYMHWVRQAPGQCLEWMGWINPNSGETNYAQKFQGRVTMTRDTSISTAYMELSRLRSDDTAVYYCARDALIVVAPVTRDYYYYGMDVWGQGTTVTASS

SEQ ID NO: 160 - protein, 507 aa, Artificial
  IX9 / bispecific MOL I2E
EIVLTQSPGTLSLSPGERATLSCRASQTVSSSYLVWYQQKPGQAPRLLIYGASSRATGIPDRFSGSGSGTDFTLTISRLEPEDFAVYYCQQYGGSPITFGCGTRLEIKGGGGSGGGGSGGGGSQVQLVQSGAEVKKPGASVKVSCKASGYTFTGYYMHWVRQAPGQCLEWMGWINPNSGETNYAQKFQGRVTMTRDTSISTAYMELSRLRSDDTAVYYCARDALIVVAPVTRDYYYYGMDVWGQGTTVTASSSGGGGSEVQLVESGGGLVQPGGSLKLSCAASGFTFNKYAINWVRQAPGKGLEWVARIRSKYNNYATYYADAVKDRFTISRDDSKNTVYLQMNNLKTEDTAVYYCARAGNFGSSYISYWAYWGQGTLVTVSSGGGGSGGGGSGGGGSQTVVTQEPSLTVSPGGTVTITCGSSTGAVTSGNYPNWVQKKPGQAPRGLIGGTKFLAPGTPARFSGSLSGGKAALTLSGVQPEDEAEYYCVLWYSNRWVFGSGTKLTVL

SEQ ID NO: 161 - protein, 995 aa, Artificial
  IX9 / HLE-BITE I2E
EIVLTQSPGTLSLSPGERATLSCRASQTVSSSYLVWYQQKPGQAPRLLIYGASSRATGIPDRFSGSGSGTDFTLTISRLEPEDFAVYYCQQYGGSPITFGCGTRLEIKGGGGSGGGGSGGGGSQVQLVQSGAEVKKPGASVKVSCKASGYTFTGYYMHWVRQAPGQCLEWMGWINPNSGETNYAQKFQGRVTMTRDTSISTAYMELSRLRSDDTAVYYCARDALIVVAPVTRDYYYYGMDVWGQGTTVTASSSGGGGSEVQLVESGGGLVQPGGSLKLSCAASGFTFNKYAINWVRQAPGKGLEWVARIRSKYNNYATYYADAVKDRFTISRDDSKNTVYLQMNNLKTEDTAVYYCARAGNFGSSYISYWAYWGQGTLVTVSSGGGGSGGGGSGGGGSQTVVTQEPSLTVSPGGTVTITCGSSTGAVTSGNYPNWVQKKPGQAPRGLIGGTKFLAPGTPARFSGSLSGGKAALTLSGVQPEDEAEYYCVLWYSNRWVFGSGTKLTVLGGGGDKTHTCPPCPAPELLGGPSVFLFPPKPKDTLMISRTPEVTCVVVDVSHEDPEVKFNWYVDGVEVHNAKTKPCEEQYGSTYRCVSVLTVLHQDWLNGKEYKCKVSNKALPAPIEKTISKAKGQPREPQVYTLPPSREEMTKNQVSLTCLVKGFYPSDIAVEWESNGQPENNYKTTPPVLDSDGSFFLYSKLTVDKSRWQQGNVFSCSVMHEALHNHYTQKSLSLSPGKGGGGSGGGGSGGGGSGGGGSGGGGSGGGGSDKTHTCPPCPAPELLGGPSVFLFPPKPKDTLMISRTPEVTCVVVDVSHEDPEVKFNWYVDGVEVHNAKTKPCEEQYGSTYRCVSVLTVLHQDWLNGKEYKCKVSNKALPAPIEKTISKAKGQPREPQVYTLPPSREEMTKNQVSLTCLVKGFYPSDIAVEWESNGQPENNYKTTPPVLDSDGSFFLYSKLTVDKSRWQQGNVFSCSVMHEALHNHYTQKSLSLSPGK

SEQ ID NO: 162 - protein, 252 aa, Artificial; identical to SEQ ID NO: 159
  IX9 / scFv I2C

SEQ ID NO: 163 - protein, 507 aa, Artificial
  IX9 / bispecific MOL I2C
EIVLTQSPGTLSLSPGERATLSCRASQTVSSSYLVWYQQKPGQAPRLLIYGASSRATGIPDRFSGSGSGTDFTLTISRLEPEDFAVYYCQQYGGSPITFGCGTRLEIKGGGGSGGGGSGGGGSQVQLVQSGAEVKKPGASVKVSCKASGYTFTGYYMHWVRQAPGQCLEWMGWINPNSGETNYAQKFQGRVTMTRDTSISTAYMELSRLRSDDTAVYYCARDALIVVAPVTRDYYYYGMDVWGQGTTVTASSSGGGGSEVQLVESGGGLVQPGGSLKLSCAASGFTFNKYAMNWVRQAPGKGLEWVARIRSKYNNYATYYADSVKDRFTISRDDSKNTAYLQMNNLKTEDTAVYYCVRHGNFGNSYISYWAYWGQGTLVTVSSGGGGSGGGGSGGGGSQTVVTQEPSLTVSPGGTVTLTCGSSTGAVTSGNYPNWVQQKPGQAPRGLIGGTKFLAPGTPARFSGSLLGGKAALTLSGVQPEDEAEYYCVLWYSNRWVFGGGTKLTVL

SEQ ID NO: 164 - protein, 995 aa, Artificial
  IX9 / HLE BITE I2C
EIVLTQSPGTLSLSPGERATLSCRASQTVSSSYLVWYQQKPGQAPRLLIYGASSRATGIPDRFSGSGSGTDFTLTISRLEPEDFAVYYCQQYGGSPITFGCGTRLEIKGGGGSGGGGSGGGGSQVQLVQSGAEVKKPGASVKVSCKASGYTFTGYYMHWVRQAPGQCLEWMGWINPNSGETNYAQKFQGRVTMTRDTSISTAYMELSRLRSDDTAVYYCARDALIVVAPVTRDYYYYGMDVWGQGTTVTASSSGGGGSEVQLVESGGGLVQPGGSLKLSCAASGFTFNKYAMNWVRQAPGKGLEWVARIRSKYNNYATYYADSVKDRFTISRDDSKNTAYLQMNNLKTEDTAVYYCVRHGNFGNSYISYWAYWGQGTLVTVSSGGGGSGGGGSGGGGSQTVVTQEPSLTVSPGGTVTLTCGSSTGAVTSGNYPNWVQQKPGQAPRGLIGGTKFLAPGTPARFSGSLLGGKAALTLSGVQPEDEAEYYCVLWYSNRWVFGGGTKLTVLGGGGDKTHTCPPCPAPELLGGPSVFLFPPKPKDTLMISRTPEVTCVVVDVSHEDPEVKFNWYVDGVEVHNAKTKPCEEQYGSTYRCVSVLTVLHQDWLNGKEYKCKVSNKALPAPIEKTISKAKGQPREPQVYTLPPSREEMTKNQVSLTCLVKGFYPSDIAVEWESNGQPENNYKTTPPVLDSDGSFFLYSKLTVDKSRWQQGNVFSCSVMHEALHNHYTQKSLSLSPGKGGGGSGGGGSGGGGSGGGGSGGGGSGGGGSDKTHTCPPCPAPELLGGPSVFLFPPKPKDTLMISRTPEVTCVVVDVSHEDPEVKFNWYVDGVEVHNAKTKPCEEQYGSTYRCVSVLTVLHQDWLNGKEYKCKVSNKALPAPIEKTISKAKGQPREPQVYTLPPSREEMTKNQVSLTCLVKGFYPSDIAVEWESNGQPENNYKTTPPVLDSDGSFFLYSKLTVDKSRWQQGNVFSCSVMHEALHNHYTQKSLSLSPGK

SEQ ID NO: 165 - protein, 129 aa, Artificial
  VH of G5X
QVQLVQSGAEVKKPGASVKVSCKASGYTFTGYYMHWVRQAPGQCLEWMGWINPNSGDANYAQKFQGRVTMTRDTSISTAYMELSRLRSDDTAVYYCARDALIVVAPVTRDYYYYGMDVWGQGTTVTVSS

SEQ ID NO: 166 - protein, 108 aa, Artificial; identical to SEQ ID NO: 152
  VL of G5X

SEQ ID NO: 167 - protein, 5 aa, Artificial
  CDR-H1 of G5X
GYYMH

SEQ ID NO: 168 - protein, 17 aa, Artificial
  CDR-H2 of G5X
WINPNSGDANYAQKFQG

SEQ ID NO: 169 - protein, 20 aa, Artificial
  CDR-H3 of G5X
DALIVVAPVTRDYYYYGMDV

SEQ ID NO: 170 - protein, 12 aa, Artificial
  CDR-L1 of G5X
RASQTVSSSYLV

SEQ ID NO: 171 - protein, 7 aa, Artificial
  CDR-L2 of G5X
GASSRAT

SEQ ID NO: 172 - protein, 9 aa, Artificial
  CDR-L3 of G5X
QQYGGSPIT

SEQ ID NO: 173 - protein, 252 aa, Artificial
  G5X / scFv I2E
EIVLTQSPGTLSLSPGERATLSCRASQTVSSSYLVWYQQKPGQAPRLLIYGASSRATGIPDRFSGSGSGTDFTLTISRLEPEDFAVYYCQQYGGSPITFGCGTRLEIKGGGGSGGGGSGGGGSQVQLVQSGAEVKKPGASVKVSCKASGYTFTGYYMHWVRQAPGQCLEWMGWINPNSGDANYAQKFQGRVTMTRDTSISTAYMELSRLRSDDTAVYYCARDALIVVAPVTRDYYYYGMDVWGQGTTVTVSS

SEQ ID NO: 174 - protein, 507 aa, Artificial
  G5X / bispecific MOL I2E
EIVLTQSPGTLSLSPGERATLSCRASQTVSSSYLVWYQQKPGQAPRLLIYGASSRATGIPDRFSGSGSGTDFTLTISRLEPEDFAVYYCQQYGGSPITFGCGTRLEIKGGGGSGGGGSGGGGSQVQLVQSGAEVKKPGASVKVSCKASGYTFTGYYMHWVRQAPGQCLEWMGWINPNSGDANYAQKFQGRVTMTRDTSISTAYMELSRLRSDDTAVYYCARDALIVVAPVTRDYYYYGMDVWGQGTTVTVSSSGGGGSEVQLVESGGGLVQPGGSLKLSCAASGFTFNKYAINWVRQAPGKGLEWVARIRSKYNNYATYYADAVKDRFTISRDDSKNTVYLQMNNLKTEDTAVYYCARAGNFGSSYISYWAYWGQGTLVTVSSGGGGSGGGGSGGGGSQTVVTQEPSLTVSPGGTVTITCGSSTGAVTSGNYPNWVQKKPGQAPRGLIGGTKFLAPGTPARFSGSLSGGKAALTLSGVQPEDEAEYYCVLWYSNRWVFGSGTKLTVL

SEQ ID NO: 175 - protein, 995 aa, Artificial
  G5X / HLE-BITE I2E
EIVLTQSPGTLSLSPGERATLSCRASQTVSSSYLVWYQQKPGQAPRLLIYGASSRATGIPDRFSGSGSGTDFTLTISRLEPEDFAVYYCQQYGGSPITFGCGTRLEIKGGGGSGGGGSGGGGSQVQLVQSGAEVKKPGASVKVSCKASGYTFTGYYMHWVRQAPGQCLEWMGWINPNSGDANYAQKFQGRVTMTRDTSISTAYMELSRLRSDDTAVYYCARDALIVVAPVTRDYYYYGMDVWGQGTTVTVSSSGGGGSEVQLVESGGGLVQPGGSLKLSCAASGFTFNKYAINWVRQAPGKGLEWVARIRSKYNNYATYYADAVKDRFTISRDDSKNTVYLQMNNLKTEDTAVYYCARAGNFGSSYISYWAYWGQGTLVTVSSGGGGSGGGGSGGGGSQTVVTQEPSLTVSPGGTVTITCGSSTGAVTSGNYPNWVQKKPGQAPRGLIGGTKFLAPGTPARFSGSLSGGKAALTLSGVQPEDEAEYYCVLWYSNRWVFGSGTKLTVLGGGGDKTHTCPPCPAPELLGGPSVFLFPPKPKDTLMISRTPEVTCVVVDVSHEDPEVKFNWYVDGVEVHNAKTKPCEEQYGSTYRCVSVLTVLHQDWLNGKEYKCKVSNKALPAPIEKTISKAKGQPREPQVYTLPPSREEMTKNQVSLTCLVKGFYPSDIAVEWESNGQPENNYKTTPPVLDSDGSFFLYSKLTVDKSRWQQGNVFSCSVMHEALHNHYTQKSLSLSPGKGGGGSGGGGSGGGGSGGGGSGGGGSGGGGSDKTHTCPPCPAPELLGGPSVFLFPPKPKDTLMISRTPEVTCVVVDVSHEDPEVKFNWYVDGVEVHNAKTKPCEEQYGSTYRCVSVLTVLHQDWLNGKEYKCKVSNKALPAPIEKTISKAKGQPREPQVYTLPPSREEMTKNQVSLTCLVKGFYPSDIAVEWESNGQPENNYKTTPPVLDSDGSFFLYSKLTVDKSRWQQGNVFSCSVMHEALHNHYTQKSLSLSPGK

SEQ ID NO: 176 - protein, 252 aa, Artificial; identical to SEQ ID NO: 173
  G5X / scFv I2C

SEQ ID NO: 177 - protein, 507 aa, Artificial
  G5X / bispecific MOL I2C
EIVLTQSPGTLSLSPGERATLSCRASQTVSSSYLVWYQQKPGQAPRLLIYGASSRATGIPDRFSGSGSGTDFTLTISRLEPEDFAVYYCQQYGGSPITFGCGTRLEIKGGGGSGGGGSGGGGSQVQLVQSGAEVKKPGASVKVSCKASGYTFTGYYMHWVRQAPGQCLEWMGWINPNSGDANYAQKFQGRVTMTRDTSISTAYMELSRLRSDDTAVYYCARDALIVVAPVTRDYYYYGMDVWGQGTTVTVSSSGGGGSEVQLVESGGGLVQPGGSLKLSCAASGFTFNKYAMNWVRQAPGKGLEWVARIRSKYNNYATYYADSVKDRFTISRDDSKNTAYLQMNNLKTEDTAVYYCVRHGNFGNSYISYWAYWGQGTLVTVSSGGGGSGGGGSGGGGSQTVVTQEPSLTVSPGGTVTLTCGSSTGAVTSGNYPNWVQQKPGQAPRGLIGGTKFLAPGTPARFSGSLLGGKAALTLSGVQPEDEAEYYCVLWYSNRWVFGGGTKLTVL

SEQ ID NO: 178 - protein, 995 aa, Artificial
  G5X / HLE BITE I2C
EIVLTQSPGTLSLSPGERATLSCRASQTVSSSYLVWYQQKPGQAPRLLIYGASSRATGIPDRFSGSGSGTDFTLTISRLEPEDFAVYYCQQYGGSPITFGCGTRLEIKGGGGSGGGGSGGGGSQVQLVQSGAEVKKPGASVKVSCKASGYTFTGYYMHWVRQAPGQCLEWMGWINPNSGDANYAQKFQGRVTMTRDTSISTAYMELSRLRSDDTAVYYCARDALIVVAPVTRDYYYYGMDVWGQGTTVTVSSSGGGGSEVQLVESGGGLVQPGGSLKLSCAASGFTFNKYAMNWVRQAPGKGLEWVARIRSKYNNYATYYADSVKDRFTISRDDSKNTAYLQMNNLKTEDTAVYYCVRHGNFGNSYISYWAYWGQGTLVTVSSGGGGSGGGGSGGGGSQTVVTQEPSLTVSPGGTVTLTCGSSTGAVTSGNYPNWVQQKPGQAPRGLIGGTKFLAPGTPARFSGSLLGGKAALTLSGVQPEDEAEYYCVLWYSNRWVFGGGTKLTVLGGGGDKTHTCPPCPAPELLGGPSVFLFPPKPKDTLMISRTPEVTCVVVDVSHEDPEVKFNWYVDGVEVHNAKTKPCEEQYGSTYRCVSVLTVLHQDWLNGKEYKCKVSNKALPAPIEKTISKAKGQPREPQVYTLPPSREEMTKNQVSLTCLVKGFYPSDIAVEWESNGQPENNYKTTPPVLDSDGSFFLYSKLTVDKSRWQQGNVFSCSVMHEALHNHYTQKSLSLSPGKGGGGSGGGGSGGGGSGGGGSGGGGSGGGGSDKTHTCPPCPAPELLGGPSVFLFPPKPKDTLMISRTPEVTCVVVDVSHEDPEVKFNWYVDGVEVHNAKTKPCEEQYGSTYRCVSVLTVLHQDWLNGKEYKCKVSNKALPAPIEKTISKAKGQPREPQVYTLPPSREEMTKNQVSLTCLVKGFYPSDIAVEWESNGQPENNYKTTPPVLDSDGSFFLYSKLTVDKSRWQQGNVFSCSVMHEALHNHYTQKSLSLSPGK

SEQ ID NO: 179 - protein, 129 aa, Artificial
  VH of O1C
QVQLVQSGAEVKKPGASVKVSCKASGYTFTGYYMHWVRQAPGQCLEWMGWINPNSGETNYAQKFQGRVTMTRDTSISTAYMELSRLRSDDTAVYYCARDNLIVVAPVTRDYYYYGMDVWGQGTTVTASS

SEQ ID NO: 180 - protein, 108 aa, Artificial; identical to SEQ ID NO: 152
  VL of O1C

SEQ ID NO: 181 - protein, 5 aa, Artificial
  CDR-H1 of O1C
GYYMH

SEQ ID NO: 182 - protein, 17 aa, Artificial
  CDR-H2 of O1C
WINPNSGETNYAQKFQG

SEQ ID NO: 183 - protein, 20 aa, Artificial
  CDR-H3 of O1C
DNLIVVAPVTRDYYYYGMDV

SEQ ID NO: 184 - protein, 12 aa, Artificial
  CDR-L1 of O1C
RASQTVSSSYLV

SEQ ID NO: 185 - protein, 7 aa, Artificial
  CDR-L2 of O1C
GASSRAT

SEQ ID NO: 186 - protein, 9 aa, Artificial
  CDR-L3 of O1C
QQYGGSPIT

SEQ ID NO: 187 - protein, 252 aa, Artificial
  O1C / scFv I2E
EIVLTQSPGTLSLSPGERATLSCRASQTVSSSYLVWYQQKPGQAPRLLIYGASSRATGIPDRFSGSGSGTDFTLTISRLEPEDFAVYYCQQYGGSPITFGCGTRLEIKGGGGSGGGGSGGGGSQVQLVQSGAEVKKPGASVKVSCKASGYTFTGYYMHWVRQAPGQCLEWMGWINPNSGETNYAQKFQGRVTMTRDTSISTAYMELSRLRSDDTAVYYCARDNLIVVAPVTRDYYYYGMDVWGQGTTVTASS

SEQ ID NO: 188 - protein, 507 aa, Artificial
  O1C / bispecific MOL I2E
EIVLTQSPGTLSLSPGERATLSCRASQTVSSSYLVWYQQKPGQAPRLLIYGASSRATGIPDRFSGSGSGTDFTLTISRLEPEDFAVYYCQQYGGSPITFGCGTRLEIKGGGGSGGGGSGGGGSQVQLVQSGAEVKKPGASVKVSCKASGYTFTGYYMHWVRQAPGQCLEWMGWINPNSGETNYAQKFQGRVTMTRDTSISTAYMELSRLRSDDTAVYYCARDNLIVVAPVTRDYYYYGMDVWGQGTTVTASSSGGGGSEVQLVESGGGLVQPGGSLKLSCAASGFTFNKYAINWVRQAPGKGLEWVARIRSKYNNYATYYADAVKDRFTISRDDSKNTVYLQMNNLKTEDTAVYYCARAGNFGSSYISYWAYWGQGTLVTVSSGGGGSGGGGSGGGGSQTVVTQEPSLTVSPGGTVTITCGSSTGAVTSGNYPNWVQKKPGQAPRGLIGGTKFLAPGTPARFSGSLSGGKAALTLSGVQPEDEAEYYCVLWYSNRWVFGSGTKLTVL

SEQ ID NO: 189 - protein, 995 aa, Artificial
  O1C / HLE-BITE I2E
EIVLTQSPGTLSLSPGERATLSCRASQTVSSSYLVWYQQKPGQAPRLLIYGASSRATGIPDRFSGSGSGTDFTLTISRLEPEDFAVYYCQQYGGSPITFGCGTRLEIKGGGGSGGGGSGGGGSQVQLVQSGAEVKKPGASVKVSCKASGYTFTGYYMHWVRQAPGQCLEWMGWINPNSGETNYAQKFQGRVTMTRDTSISTAYMELSRLRSDDTAVYYCARDNLIVVAPVTRDYYYYGMDVWGQGTTVTASSSGGGGSEVQLVESGGGLVQPGGSLKLSCAASGFTFNKYAINWVRQAPGKGLEWVARIRSKYNNYATYYADAVKDRFTISRDDSKNTVYLQMNNLKTEDTAVYYCARAGNFGSSYISYWAYWGQGTLVTVSSGGGGSGGGGSGGGGSQTVVTQEPSLTVSPGGTVTITCGSSTGAVTSGNYPNWVQKKPGQAPRGLIGGTKFLAPGTPARFSGSLSGGKAALTLSGVQPEDEAEYYCVLWYSNRWVFGSGTKLTVLGGGGDKTHTCPPCPAPELLGGPSVFLFPPKPKDTLMISRTPEVTCVVVDVSHEDPEVKFNWYVDGVEVHNAKTKPCEEQYGSTYRCVSVLTVLHQDWLNGKEYKCKVSNKALPAPIEKTISKAKGQPREPQVYTLPPSREEMTKNQVSLTCLVKGFYPSDIAVEWESNGQPENNYKTTPPVLDSDGSFFLYSKLTVDKSRWQQGNVFSCSVMHEALHNHYTQKSLSLSPGKGGGGSGGGGSGGGGSGGGGSGGGGSGGGGSDKTHTCPPCPAPELLGGPSVFLFPPKPKDTLMISRTPEVTCVVVDVSHEDPEVKFNWYVDGVEVHNAKTKPCEEQYGSTYRCVSVLTVLHQDWLNGKEYKCKVSNKALPAPIEKTISKAKGQPREPQVYTLPPSREEMTKNQVSLTCLVKGFYPSDIAVEWESNGQPENNYKTTPPVLDSDGSFFLYSKLTVDKSRWQQGNVFSCSVMHEALHNHYTQKSLSLSPGK

SEQ ID NO: 190 - protein, 252 aa, Artificial; identical to SEQ ID NO: 187
  O1C / scFv I2C

SEQ ID NO: 191 - protein, 252 aa, Artificial; identical to SEQ ID NO: 187
  O1C / bispecific MOL I2C

SEQ ID NO: 192 - protein, 995 aa, Artificial
  O1C / HLE-BITE I2C
EIVLTQSPGTLSLSPGERATLSCRASQTVSSSYLVWYQQKPGQAPRLLIYGASSRATGIPDRFSGSGSGTDFTLTISRLEPEDFAVYYCQQYGGSPITFGCGTRLEIKGGGGSGGGGSGGGGSQVQLVQSGAEVKKPGASVKVSCKASGYTFTGYYMHWVRQAPGQCLEWMGWINPNSGETNYAQKFQGRVTMTRDTSISTAYMELSRLRSDDTAVYYCARDNLIVVAPVTRDYYYYGMDVWGQGTTVTASSSGGGGSEVQLVESGGGLVQPGGSLKLSCAASGFTFNKYAMNWVRQAPGKGLEWVARIRSKYNNYATYYADSVKDRFTISRDDSKNTAYLQMNNLKTEDTAVYYCVRHGNFGNSYISYWAYWGQGTLVTVSSGGGGSGGGGSGGGGSQTVVTQEPSLTVSPGGTVTLTCGSSTGAVTSGNYPNWVQQKPGQAPRGLIGGTKFLAPGTPARFSGSLLGGKAALTLSGVQPEDEAEYYCVLWYSNRWVFGGGTKLTVLGGGGDKTHTCPPCPAPELLGGPSVFLFPPKPKDTLMISRTPEVTCVVVDVSHEDPEVKFNWYVDGVEVHNAKTKPCEEQYGSTYRCVSVLTVLHQDWLNGKEYKCKVSNKALPAPIEKTISKAKGQPREPQVYTLPPSREEMTKNQVSLTCLVKGFYPSDIAVEWESNGQPENNYKTTPPVLDSDGSFFLYSKLTVDKSRWQQGNVFSCSVMHEALHNHYTQKSLSLSPGKGGGGSGGGGSGGGGSGGGGSGGGGSGGGGSDKTHTCPPCPAPELLGGPSVFLFPPKPKDTLMISRTPEVTCVVVDVSHEDPEVKFNWYVDGVEVHNAKTKPCEEQYGSTYRCVSVLTVLHQDWLNGKEYKCKVSNKALPAPIEKTISKAKGQPREPQVYTLPPSREEMTKNQVSLTCLVKGFYPSDIAVEWESNGQPENNYKTTPPVLDSDGSFFLYSKLTVDKSRWQQGNVFSCSVMHEALHNHYTQKSLSLSPGK

SEQ ID NO: 193 - protein, 129 aa, Artificial
  VH of A3S
QVQLVQSGAEVKKPGASVKVSCKASGYTFTGYYMHWVRQAPGQCLEWMGWINPNSGETNYAQKFQGRVTMTRDTSISTAYMELSRLRSDDTAVYYCARDNLIVVAPVTRDYYYYGMDVWGQGTTVTVSS

SEQ ID NO: 194 - protein, 108 aa, Artificial; identical to SEQ ID NO: 12
  VL of A3S

SEQ ID NO: 195 - protein, 5 aa, Artificial
  CDR-H1 of A3S
GYYMH

SEQ ID NO: 196 - protein, 17 aa, Artificial
  CDR-H2 of A3S
WINPNSGETNYAQKFQG

SEQ ID NO: 197 - protein, 20 aa, Artificial
  CDR-H3 of A3S
DNLIVVAPVTRDYYYYGMDV

SEQ ID NO: 198 - protein, 12 aa, Artificial
  CDR-L1 of A3S
RASQSVSSSYLA

SEQ ID NO: 199 - protein, 7 aa, Artificial
  CDR-L2 of A3S
GASSRAT

SEQ ID NO: 200 - protein, 9 aa, Artificial
  CDR-L3 of A3S
QQYGSSPLT

SEQ ID NO: 201 - protein, 252 aa, Artificial
  A3S / scFv I2E
EIVLTQSPGTLSLSPGERATLSCRASQSVSSSYLAWYQQKPGQAPRLLIYGASSRATGIPDRFSGSGSGTDFTLTISRLEPEDFAVYYCQQYGSSPLTFGCGTKLEIKGGGGSGGGGSGGGGSQVQLVQSGAEVKKPGASVKVSCKASGYTFTGYYMHWVRQAPGQCLEWMGWINPNSGETNYAQKFQGRVTMTRDTSISTAYMELSRLRSDDTAVYYCARDNLIVVAPVTRDYYYYGMDVWGQGTTVTVSS

SEQ ID NO: 202 - protein, 507 aa, Artificial
  A3S / bispecific MOL I2E
EIVLTQSPGTLSLSPGERATLSCRASQSVSSSYLAWYQQKPGQAPRLLIYGASSRATGIPDRFSGSGSGTDFTLTISRLEPEDFAVYYCQQYGSSPLTFGCGTKLEIKGGGGSGGGGSGGGGSQVQLVQSGAEVKKPGASVKVSCKASGYTFTGYYMHWVRQAPGQCLEWMGWINPNSGETNYAQKFQGRVTMTRDTSISTAYMELSRLRSDDTAVYYCARDNLIVVAPVTRDYYYYGMDVWGQGTTVTVSSSGGGGSEVQLVESGGGLVQPGGSLKLSCAASGFTFNKYAINWVRQAPGKGLEWVARIRSKYNNYATYYADAVKDRFTISRDDSKNTVYLQMNNLKTEDTAVYYCARAGNFGSSYISYWAYWGQGTLVTVSSGGGGSGGGGSGGGGSQTVVTQEPSLTVSPGGTVTITCGSSTGAVTSGNYPNWVQKKPGQAPRGLIGGTKFLAPGTPARFSGSLSGGKAALTLSGVQPEDEAEYYCVLWYSNRWVFGSGTKLTVL

SEQ ID NO: 203 - protein, 995 aa, Artificial
  A3S / HLE-BITE I2E
EIVLTQSPGTLSLSPGERATLSCRASQSVSSSYLAWYQQKPGQAPRLLIYGASSRATGIPDRFSGSGSGTDFTLTISRLEPEDFAVYYCQQYGSSPLTFGCGTKLEIKGGGGSGGGGSGGGGSQVQLVQSGAEVKKPGASVKVSCKASGYTFTGYYMHWVRQAPGQCLEWMGWINPNSGETNYAQKFQGRVTMTRDTSISTAYMELSRLRSDDTAVYYCARDNLIVVAPVTRDYYYYGMDVWGQGTTVTVSSSGGGGSEVQLVESGGGLVQPGGSLKLSCAASGFTFNKYAINWVRQAPGKGLEWVARIRSKYNNYATYYADAVKDRFTISRDDSKNTVYLQMNNLKTEDTAVYYCARAGNFGSSYISYWAYWGQGTLVTVSSGGGGSGGGGSGGGGSQTVVTQEPSLTVSPGGTVTITCGSSTGAVTSGNYPNWVQKKPGQAPRGLIGGTKFLAPGTPARFSGSLSGGKAALTLSGVQPEDEAEYYCVLWYSNRWVFGSGTKLTVLGGGGDKTHTCPPCPAPELLGGPSVFLFPPKPKDTLMISRTPEVTCVVVDVSHEDPEVKFNWYVDGVEVHNAKTKPCEEQYGSTYRCVSVLTVLHQDWLNGKEYKCKVSNKALPAPIEKTISKAKGQPREPQVYTLPPSREEMTKNQVSLTCLVKGFYPSDIAVEWESNGQPENNYKTTPPVLDSDGSFFLYSKLTVDKSRWQQGNVFSCSVMHEALHNHYTQKSLSLSPGKGGGGSGGGGSGGGGSGGGGSGGGGSGGGGSDKTHTCPPCPAPELLGGPSVFLFPPKPKDTLMISRTPEVTCVVVDVSHEDPEVKFNWYVDGVEVHNAKTKPCEEQYGSTYRCVSVLTVLHQDWLNGKEYKCKVSNKALPAPIEKTISKAKGQPREPQVYTLPPSREEMTKNQVSLTCLVKGFYPSDIAVEWESNGQPENNYKTTPPVLDSDGSFFLYSKLTVDKSRWQQGNVFSCSVMHEALHNHYTQKSLSLSPGK

SEQ ID NO: 204 - protein, 252 aa, Artificial; identical to SEQ ID NO: 201
  A3S / scFv I2C

SEQ ID NO: 205 - protein, 507 aa, Artificial
  A3S / bispecific MOL I2C
EIVLTQSPGTLSLSPGERATLSCRASQSVSSSYLAWYQQKPGQAPRLLIYGASSRATGIPDRFSGSGSGTDFTLTISRLEPEDFAVYYCQQYGSSPLTFGCGTKLEIKGGGGSGGGGSGGGGSQVQLVQSGAEVKKPGASVKVSCKASGYTFTGYYMHWVRQAPGQCLEWMGWINPNSGETNYAQKFQGRVTMTRDTSISTAYMELSRLRSDDTAVYYCARDNLIVVAPVTRDYYYYGMDVWGQGTTVTVSSSGGGGSEVQLVESGGGLVQPGGSLKLSCAASGFTFNKYAMNWVRQAPGKGLEWVARIRSKYNNYATYYADSVKDRFTISRDDSKNTAYLQMNNLKTEDTAVYYCVRHGNFGNSYISYWAYWGQGTLVTVSSGGGGSGGGGSGGGGSQTVVTQEPSLTVSPGGTVTLTCGSSTGAVTSGNYPNWVQQKPGQAPRGLIGGTKFLAPGTPARFSGSLLGGKAALTLSGVQPEDEAEYYCVLWYSNRWVFGGGTKLTVL

SEQ ID NO: 206 - protein, 995 aa, Artificial
  A3S / HLE BITE I2C
EIVLTQSPGTLSLSPGERATLSCRASQSVSSSYLAWYQQKPGQAPRLLIYGASSRATGIPDRFSGSGSGTDFTLTISRLEPEDFAVYYCQQYGSSPLTFGCGTKLEIKGGGGSGGGGSGGGGSQVQLVQSGAEVKKPGASVKVSCKASGYTFTGYYMHWVRQAPGQCLEWMGWINPNSGETNYAQKFQGRVTMTRDTSISTAYMELSRLRSDDTAVYYCARDNLIVVAPVTRDYYYYGMDVWGQGTTVTVSSSGGGGSEVQLVESGGGLVQPGGSLKLSCAASGFTFNKYAMNWVRQAPGKGLEWVARIRSKYNNYATYYADSVKDRFTISRDDSKNTAYLQMNNLKTEDTAVYYCVRHGNFGNSYISYWAYWGQGTLVTVSSGGGGSGGGGSGGGGSQTVVTQEPSLTVSPGGTVTLTCGSSTGAVTSGNYPNWVQQKPGQAPRGLIGGTKFLAPGTPARFSGSLLGGKAALTLSGVQPEDEAEYYCVLWYSNRWVFGGGTKLTVLGGGGDKTHTCPPCPAPELLGGPSVFLFPPKPKDTLMISRTPEVTCVVVDVSHEDPEVKFNWYVDGVEVHNAKTKPCEEQYGSTYRCVSVLTVLHQDWLNGKEYKCKVSNKALPAPIEKTISKAKGQPREPQVYTLPPSREEMTKNQVSLTCLVKGFYPSDIAVEWESNGQPENNYKTTPPVLDSDGSFFLYSKLTVDKSRWQQGNVFSCSVMHEALHNHYTQKSLSLSPGKGGGGSGGGGSGGGGSGGGGSGGGGSGGGGSDKTHTCPPCPAPELLGGPSVFLFPPKPKDTLMISRTPEVTCVVVDVSHEDPEVKFNWYVDGVEVHNAKTKPCEEQYGSTYRCVSVLTVLHQDWLNGKEYKCKVSNKALPAPIEKTISKAKGQPREPQVYTLPPSREEMTKNQVSLTCLVKGFYPSDIAVEWESNGQPENNYKTTPPVLDSDGSFFLYSKLTVDKSRWQQGNVFSCSVMHEALHNHYTQKSLSLSPGK

SEQ ID NO: 207 - protein, 129 aa, Artificial
  VH of B2J
QVQLVQSGAEVKKPGASVKVSCKASGYTFTGYYMHWVRQAPGQCLEWMGWINPNSGDANYAQKFQGRVTMTRDTSISTAYMELSRLRSDDTAVYYCARDNLIVVAPVTRDYYYYGMDVWGQGTTVTVSS

SEQ ID NO: 208 - protein, 108 aa, Artificial; identical to SEQ ID NO: 152
  VL of B2J

SEQ ID NO: 209 - protein, 5 aa, Artificial
  CDR-H1 of B2J
GYYMH

SEQ ID NO: 210 - protein, 17 aa, Artificial
  CDR-H2 of B2J
WINPNSGDANYAQKFQG

SEQ ID NO: 211 - protein, 20 aa, Artificial
  CDR-H3 of B2J
DNLIVVAPVTRDYYYYGMDV

SEQ ID NO: 212 - protein, 12 aa, Artificial
  CDR-L1 of B2J
RASQTVSSSYLV

SEQ ID NO: 213 - protein, 7 aa, Artificial
  CDR-L2 of B2J
GASSRAT

SEQ ID NO: 214 - protein, 9 aa, Artificial
  CDR-L3 of B2J
QQYGGSPIT

SEQ ID NO: 215 - protein, 252 aa, Artificial
  B2J / scFv I2E
EIVLTQSPGTLSLSPGERATLSCRASQTVSSSYLVWYQQKPGQAPRLLIYGASSRATGIPDRFSGSGSGTDFTLTISRLEPEDFAVYYCQQYGGSPITFGCGTRLEIKGGGGSGGGGSGGGGSQVQLVQSGAEVKKPGASVKVSCKASGYTFTGYYMHWVRQAPGQCLEWMGWINPNSGDANYAQKFQGRVTMTRDTSISTAYMELSRLRSDDTAVYYCARDNLIVVAPVTRDYYYYGMDVWGQGTTVTVSS

SEQ ID NO: 216 - protein, 507 aa, Artificial
  B2J / bispecific MOL I2E
EIVLTQSPGTLSLSPGERATLSCRASQTVSSSYLVWYQQKPGQAPRLLIYGASSRATGIPDRFSGSGSGTDFTLTISRLEPEDFAVYYCQQYGGSPITFGCGTRLEIKGGGGSGGGGSGGGGSQVQLVQSGAEVKKPGASVKVSCKASGYTFTGYYMHWVRQAPGQCLEWMGWINPNSGDANYAQKFQGRVTMTRDTSISTAYMELSRLRSDDTAVYYCARDNLIVVAPVTRDYYYYGMDVWGQGTTVTVSSSGGGGSEVQLVESGGGLVQPGGSLKLSCAASGFTFNKYAINWVRQAPGKGLEWVARIRSKYNNYATYYADAVKDRFTISRDDSKNTVYLQMNNLKTEDTAVYYCARAGNFGSSYISYWAYWGQGTLVTVSSGGGGSGGGGSGGGGSQTVVTQEPSLTVSPGGTVTITCGSSTGAVTSGNYPNWVQKKPGQAPRGLIGGTKFLAPGTPARFSGSLSGGKAALTLSGVQPEDEAEYYCVLWYSNRWVFGSGTKLTVL

SEQ ID NO: 217 - protein, 995 aa, Artificial
  B2J / HLE-BITE I2E
EIVLTQSPGTLSLSPGERATLSCRASQTVSSSYLVWYQQKPGQAPRLLIYGASSRATGIPDRFSGSGSGTDFTLTISRLEPEDFAVYYCQQYGGSPITFGCGTRLEIKGGGGSGGGGSGGGGSQVQLVQSGAEVKKPGASVKVSCKASGYTFTGYYMHWVRQAPGQCLEWMGWINPNSGDANYAQKFQGRVTMTRDTSISTAYMELSRLRSDDTAVYYCARDNLIVVAPVTRDYYYYGMDVWGQGTTVTVSSSGGGGSEVQLVESGGGLVQPGGSLKLSCAASGFTFNKYAINWVRQAPGKGLEWVARIRSKYNNYATYYADAVKDRFTISRDDSKNTVYLQMNNLKTEDTAVYYCARAGNFGSSYISYWAYWGQGTLVTVSSGGGGSGGGGSGGGGSQTVVTQEPSLTVSPGGTVTITCGSSTGAVTSGNYPNWVQKKPGQAPRGLIGGTKFLAPGTPARFSGSLSGGKAALTLSGVQPEDEAEYYCVLWYSNRWVFGSGTKLTVLGGGGDKTHTCPPCPAPELLGGPSVFLFPPKPKDTLMISRTPEVTCVVVDVSHEDPEVKFNWYVDGVEVHNAKTKPCEEQYGSTYRCVSVLTVLHQDWLNGKEYKCKVSNKALPAPIEKTISKAKGQPREPQVYTLPPSREEMTKNQVSLTCLVKGFYPSDIAVEWESNGQPENNYKTTPPVLDSDGSFFLYSKLTVDKSRWQQGNVFSCSVMHEALHNHYTQKSLSLSPGKGGGGSGGGGSGGGGSGGGGSGGGGSGGGGSDKTHTCPPCPAPELLGGPSVFLFPPKPKDTLMISRTPEVTCVVVDVSHEDPEVKFNWYVDGVEVHNAKTKPCEEQYGSTYRCVSVLTVLHQDWLNGKEYKCKVSNKALPAPIEKTISKAKGQPREPQVYTLPPSREEMTKNQVSLTCLVKGFYPSDIAVEWESNGQPENNYKTTPPVLDSDGSFFLYSKLTVDKSRWQQGNVFSCSVMHEALHNHYTQKSLSLSPGK

SEQ ID NO: 218 - protein, 252 aa, Artificial; identical to SEQ ID NO: 215
  B2J / scFv I2C

SEQ ID NO: 219 - protein, 507 aa, Artificial
  B2J / bispecific MOL I2C
EIVLTQSPGTLSLSPGERATLSCRASQTVSSSYLVWYQQKPGQAPRLLIYGASSRATGIPDRFSGSGSGTDFTLTISRLEPEDFAVYYCQQYGGSPITFGCGTRLEIKGGGGSGGGGSGGGGSQVQLVQSGAEVKKPGASVKVSCKASGYTFTGYYMHWVRQAPGQCLEWMGWINPNSGDANYAQKFQGRVTMTRDTSISTAYMELSRLRSDDTAVYYCARDNLIVVAPVTRDYYYYGMDVWGQGTTVTVSSSGGGGSEVQLVESGGGLVQPGGSLKLSCAASGFTFNKYAMNWVRQAPGKGLEWVARIRSKYNNYATYYADSVKDRFTISRDDSKNTAYLQMNNLKTEDTAVYYCVRHGNFGNSYISYWAYWGQGTLVTVSSGGGGSGGGGSGGGGSQTVVTQEPSLTVSPGGTVTLTCGSSTGAVTSGNYPNWVQQKPGQAPRGLIGGTKFLAPGTPARFSGSLLGGKAALTLSGVQPEDEAEYYCVLWYSNRWVFGGGTKLTVL

SEQ ID NO: 220 - protein, 995 aa, Artificial
  B2J / HLE BITE I2C
EIVLTQSPGTLSLSPGERATLSCRASQTVSSSYLVWYQQKPGQAPRLLIYGASSRATGIPDRFSGSGSGTDFTLTISRLEPEDFAVYYCQQYGGSPITFGCGTRLEIKGGGGSGGGGSGGGGSQVQLVQSGAEVKKPGASVKVSCKASGYTFTGYYMHWVRQAPGQCLEWMGWINPNSGDANYAQKFQGRVTMTRDTSISTAYMELSRLRSDDTAVYYCARDNLIVVAPVTRDYYYYGMDVWGQGTTVTVSSSGGGGSEVQLVESGGGLVQPGGSLKLSCAASGFTFNKYAMNWVRQAPGKGLEWVARIRSKYNNYATYYADSVKDRFTISRDDSKNTAYLQMNNLKTEDTAVYYCVRHGNFGNSYISYWAYWGQGTLVTVSSGGGGSGGGGSGGGGSQTVVTQEPSLTVSPGGTVTLTCGSSTGAVTSGNYPNWVQQKPGQAPRGLIGGTKFLAPGTPARFSGSLLGGKAALTLSGVQPEDEAEYYCVLWYSNRWVFGGGTKLTVLGGGGDKTHTCPPCPAPELLGGPSVFLFPPKPKDTLMISRTPEVTCVVVDVSHEDPEVKFNWYVDGVEVHNAKTKPCEEQYGSTYRCVSVLTVLHQDWLNGKEYKCKVSNKALPAPIEKTISKAKGQPREPQVYTLPPSREEMTKNQVSLTCLVKGFYPSDIAVEWESNGQPENNYKTTPPVLDSDGSFFLYSKLTVDKSRWQQGNVFSCSVMHEALHNHYTQKSLSLSPGKGGGGSGGGGSGGGGSGGGGSGGGGSGGGGSDKTHTCPPCPAPELLGGPSVFLFPPKPKDTLMISRTPEVTCVVVDVSHEDPEVKFNWYVDGVEVHNAKTKPCEEQYGSTYRCVSVLTVLHQDWLNGKEYKCKVSNKALPAPIEKTISKAKGQPREPQVYTLPPSREEMTKNQVSLTCLVKGFYPSDIAVEWESNGQPENNYKTTPPVLDSDGSFFLYSKLTVDKSRWQQGNVFSCSVMHEALHNHYTQKSLSLSPGK

SEQ ID NO: 221 - protein, 129 aa, Artificial; identical to SEQ ID NO: 207
  VH of M5E

SEQ ID NO: 222 - protein, 108 aa, Artificial; identical to SEQ ID NO: 12
  VL of M5E

SEQ ID NO: 223 - protein, 5 aa, Artificial
  CDR-H1 of M5E
GYYMH

SEQ ID NO: 224 - protein, 17 aa, Artificial
  CDR-H2 of M5E
WINPNSGDANYAQKFQG

SEQ ID NO: 225 - protein, 20 aa, Artificial
  CDR-H3 of M5E
DNLIVVAPVTRDYYYYGMDV

SEQ ID NO: 226 - protein, 12 aa, Artificial
  CDR-L1 of M5E
RASQSVSSSYLA

SEQ ID NO: 227 - protein, 7 aa, Artificial
  CDR-L2 of M5E
GASSRAT

SEQ ID NO: 228 - protein, 9 aa, Artificial
  CDR-L3 of M5E
QQYGSSPLT

SEQ ID NO: 229 - protein, 252 aa, Artificial
  M5E / scFv I2E
EIVLTQSPGTLSLSPGERATLSCRASQSVSSSYLAWYQQKPGQAPRLLIYGASSRATGIPDRFSGSGSGTDFTLTISRLEPEDFAVYYCQQYGSSPLTFGCGTKLEIKGGGGSGGGGSGGGGSQVQLVQSGAEVKKPGASVKVSCKASGYTFTGYYMHWVRQAPGQCLEWMGWINPNSGDANYAQKFQGRVTMTRDTSISTAYMELSRLRSDDTAVYYCARDNLIVVAPVTRDYYYYGMDVWGQGTTVTVSS

SEQ ID NO: 230 - protein, 507 aa, Artificial
  M5E / bispecific MOL I2E
EIVLTQSPGTLSLSPGERATLSCRASQSVSSSYLAWYQQKPGQAPRLLIYGASSRATGIPDRFSGSGSGTDFTLTISRLEPEDFAVYYCQQYGSSPLTFGCGTKLEIKGGGGSGGGGSGGGGSQVQLVQSGAEVKKPGASVKVSCKASGYTFTGYYMHWVRQAPGQCLEWMGWINPNSGDANYAQKFQGRVTMTRDTSISTAYMELSRLRSDDTAVYYCARDNLIVVAPVTRDYYYYGMDVWGQGTTVTVSSSGGGGSEVQLVESGGGLVQPGGSLKLSCAASGFTFNKYAINWVRQAPGKGLEWVARIRSKYNNYATYYADAVKDRFTISRDDSKNTVYLQMNNLKTEDTAVYYCARAGNFGSSYISYWAYWGQGTLVTVSSGGGGSGGGGSGGGGSQTVVTQEPSLTVSPGGTVTITCGSSTGAVTSGNYPNWVQKKPGQAPRGLIGGTKFLAPGTPARFSGSLSGGKAALTLSGVQPEDEAEYYCVLWYSNRWVFGSGTKLTVL

SEQ ID NO: 231 - protein, 995 aa, Artificial
  M5E / HLE-BITE I2E
EIVLTQSPGTLSLSPGERATLSCRASQSVSSSYLAWYQQKPGQAPRLLIYGASSRATGIPDRFSGSGSGTDFTLTISRLEPEDFAVYYCQQYGSSPLTFGCGTKLEIKGGGGSGGGGSGGGGSQVQLVQSGAEVKKPGASVKVSCKASGYTFTGYYMHWVRQAPGQCLEWMGWINPNSGDANYAQKFQGRVTMTRDTSISTAYMELSRLRSDDTAVYYCARDNLIVVAPVTRDYYYYGMDVWGQGTTVTVSSSGGGGSEVQLVESGGGLVQPGGSLKLSCAASGFTFNKYAINWVRQAPGKGLEWVARIRSKYNNYATYYADAVKDRFTISRDDSKNTVYLQMNNLKTEDTAVYYCARAGNFGSSYISYWAYWGQGTLVTVSSGGGGSGGGGSGGGGSQTVVTQEPSLTVSPGGTVTITCGSSTGAVTSGNYPNWVQKKPGQAPRGLIGGTKFLAPGTPARFSGSLSGGKAALTLSGVQPEDEAEYYCVLWYSNRWVFGSGTKLTVLGGGGDKTHTCPPCPAPELLGGPSVFLFPPKPKDTLMISRTPEVTCVVVDVSHEDPEVKFNWYVDGVEVHNAKTKPCEEQYGSTYRCVSVLTVLHQDWLNGKEYKCKVSNKALPAPIEKTISKAKGQPREPQVYTLPPSREEMTKNQVSLTCLVKGFYPSDIAVEWESNGQPENNYKTTPPVLDSDGSFFLYSKLTVDKSRWQQGNVFSCSVMHEALHNHYTQKSLSLSPGKGGGGSGGGGSGGGGSGGGGSGGGGSGGGGSDKTHTCPPCPAPELLGGPSVFLFPPKPKDTLMISRTPEVTCVVVDVSHEDPEVKFNWYVDGVEVHNAKTKPCEEQYGSTYRCVSVLTVLHQDWLNGKEYKCKVSNKALPAPIEKTISKAKGQPREPQVYTLPPSREEMTKNQVSLTCLVKGFYPSDIAVEWESNGQPENNYKTTPPVLDSDGSFFLYSKLTVDKSRWQQGNVFSCSVMHEALHNHYTQKSLSLSPGK

SEQ ID NO: 232 - protein, 252 aa, Artificial; identical to SEQ ID NO: 229
  M5E / scFv I2C

SEQ ID NO: 233 - protein, 507 aa, Artificial
  M5E / bispecific MOL I2C
EIVLTQSPGTLSLSPGERATLSCRASQSVSSSYLAWYQQKPGQAPRLLIYGASSRATGIPDRFSGSGSGTDFTLTISRLEPEDFAVYYCQQYGSSPLTFGCGTKLEIKGGGGSGGGGSGGGGSQVQLVQSGAEVKKPGASVKVSCKASGYTFTGYYMHWVRQAPGQCLEWMGWINPNSGDANYAQKFQGRVTMTRDTSISTAYMELSRLRSDDTAVYYCARDNLIVVAPVTRDYYYYGMDVWGQGTTVTVSSSGGGGSEVQLVESGGGLVQPGGSLKLSCAASGFTFNKYAMNWVRQAPGKGLEWVARIRSKYNNYATYYADSVKDRFTISRDDSKNTAYLQMNNLKTEDTAVYYCVRHGNFGNSYISYWAYWGQGTLVTVSSGGGGSGGGGSGGGGSQTVVTQEPSLTVSPGGTVTLTCGSSTGAVTSGNYPNWVQQKPGQAPRGLIGGTKFLAPGTPARFSGSLLGGKAALTLSGVQPEDEAEYYCVLWYSNRWVFGGGTKLTVL

SEQ ID NO: 234 - protein, 995 aa, Artificial
  M5E / HLE BITE I2C
EIVLTQSPGTLSLSPGERATLSCRASQSVSSSYLAWYQQKPGQAPRLLIYGASSRATGIPDRFSGSGSGTDFTLTISRLEPEDFAVYYCQQYGSSPLTFGCGTKLEIKGGGGSGGGGSGGGGSQVQLVQSGAEVKKPGASVKVSCKASGYTFTGYYMHWVRQAPGQCLEWMGWINPNSGDANYAQKFQGRVTMTRDTSISTAYMELSRLRSDDTAVYYCARDNLIVVAPVTRDYYYYGMDVWGQGTTVTVSSSGGGGSEVQLVESGGGLVQPGGSLKLSCAASGFTFNKYAMNWVRQAPGKGLEWVARIRSKYNNYATYYADSVKDRFTISRDDSKNTAYLQMNNLKTEDTAVYYCVRHGNFGNSYISYWAYWGQGTLVTVSSGGGGSGGGGSGGGGSQTVVTQEPSLTVSPGGTVTLTCGSSTGAVTSGNYPNWVQQKPGQAPRGLIGGTKFLAPGTPARFSGSLLGGKAALTLSGVQPEDEAEYYCVLWYSNRWVFGGGTKLTVLGGGGDKTHTCPPCPAPELLGGPSVFLFPPKPKDTLMISRTPEVTCVVVDVSHEDPEVKFNWYVDGVEVHNAKTKPCEEQYGSTYRCVSVLTVLHQDWLNGKEYKCKVSNKALPAPIEKTISKAKGQPREPQVYTLPPSREEMTKNQVSLTCLVKGFYPSDIAVEWESNGQPENNYKTTPPVLDSDGSFFLYSKLTVDKSRWQQGNVFSCSVMHEALHNHYTQKSLSLSPGKGGGGSGGGGSGGGGSGGGGSGGGGSGGGGSDKTHTCPPCPAPELLGGPSVFLFPPKPKDTLMISRTPEVTCVVVDVSHEDPEVKFNWYVDGVEVHNAKTKPCEEQYGSTYRCVSVLTVLHQDWLNGKEYKCKVSNKALPAPIEKTISKAKGQPREPQVYTLPPSREEMTKNQVSLTCLVKGFYPSDIAVEWESNGQPENNYKTTPPVLDSDGSFFLYSKLTVDKSRWQQGNVFSCSVMHEALHNHYTQKSLSLSPGK

SEQ ID NO: 235 - protein, 129 aa, Artificial
  VH of X3A
QVQLVQSGAEVKKPGASVKVSCKASGYTFTGYYMHWVRQAPGQCLEWMGWINPNSGDANYAQKFQGRVTMTRDTSISTAYMELSRLRSDDTAVYYCARDALIVVAPVTRDYYYYGMDVWGQGTTVTASS

SEQ ID NO: 236 - protein, 108 aa, Artificial
  VL of X3A
EIVLTQSPGTLSLSPGERATLSCRASQTVSSSYLVWYQQKPGQAPRLLIYGASSRATGIPDRFSGSGSGTDFTLIISRLEPEDFAVYYCQQYGGSPITFGCGTRLEIK

SEQ ID NO: 237 - protein, 5 aa, Artificial
  CDR-H1 of X3A
GYYMH

SEQ ID NO: 238 - protein, 17 aa, Artificial
  CDR-H2 of X3A
WINPNSGDANYAQKFQG

SEQ ID NO: 239 - protein, 20 aa, Artificial
  CDR-H3 of X3A
DALIVVAPVTRDYYYYGMDV

SEQ ID NO: 240 - protein, 12 aa, Artificial
  CDR-L1 of X3A
RASQTVSSSYLV

SEQ ID NO: 241 - protein, 7 aa, Artificial
  CDR-L2 of X3A
GASSRAT

SEQ ID NO: 242 - protein, 9 aa, Artificial
  CDR-L3 of X3A
QQYGGSPIT

SEQ ID NO: 243 - protein, 252 aa, Artificial
  X3A / scFv I2E
EIVLTQSPGTLSLSPGERATLSCRASQTVSSSYLVWYQQKPGQAPRLLIYGASSRATGIPDRFSGSGSGTDFTLIISRLEPEDFAVYYCQQYGGSPITFGCGTRLEIKGGGGSGGGGSGGGGSQVQLVQSGAEVKKPGASVKVSCKASGYTFTGYYMHWVRQAPGQCLEWMGWINPNSGDANYAQKFQGRVTMTRDTSISTAYMELSRLRSDDTAVYYCARDALIVVAPVTRDYYYYGMDVWGQGTTVTASS

SEQ ID NO: 244 - protein, 507 aa, Artificial
  X3A / bispecific MOL I2E
EIVLTQSPGTLSLSPGERATLSCRASQTVSSSYLVWYQQKPGQAPRLLIYGASSRATGIPDRFSGSGSGTDFTLIISRLEPEDFAVYYCQQYGGSPITFGCGTRLEIKGGGGSGGGGSGGGGSQVQLVQSGAEVKKPGASVKVSCKASGYTFTGYYMHWVRQAPGQCLEWMGWINPNSGDANYAQKFQGRVTMTRDTSISTAYMELSRLRSDDTAVYYCARDALIVVAPVTRDYYYYGMDVWGQGTTVTASSSGGGGSEVQLVESGGGLVQPGGSLKLSCAASGFTFNKYAINWVRQAPGKGLEWVARIRSKYNNYATYYADAVKDRFTISRDDSKNTVYLQMNNLKTEDTAVYYCARAGNFGSSYISYWAYWGQGTLVTVSSGGGGSGGGGSGGGGSQTVVTQEPSLTVSPGGTVTITCGSSTGAVTSGNYPNWVQKKPGQAPRGLIGGTKFLAPGTPARFSGSLSGGKAALTLSGVQPEDEAEYYCVLWYSNRWVFGSGTKLTVL

SEQ ID NO: 245 - protein, 995 aa, Artificial
  X3A / HLE-BITE I2E
EIVLTQSPGTLSLSPGERATLSCRASQTVSSSYLVWYQQKPGQAPRLLIYGASSRATGIPDRFSGSGSGTDFTLIISRLEPEDFAVYYCQQYGGSPITFGCGTRLEIKGGGGSGGGGSGGGGSQVQLVQSGAEVKKPGASVKVSCKASGYTFTGYYMHWVRQAPGQCLEWMGWINPNSGDANYAQKFQGRVTMTRDTSISTAYMELSRLRSDDTAVYYCARDALIVVAPVTRDYYYYGMDVWGQGTTVTASSSGGGGSEVQLVESGGGLVQPGGSLKLSCAASGFTFNKYAINWVRQAPGKGLEWVARIRSKYNNYATYYADAVKDRFTISRDDSKNTVYLQMNNLKTEDTAVYYCARAGNFGSSYISYWAYWGQGTLVTVSSGGGGSGGGGSGGGGSQTVVTQEPSLTVSPGGTVTITCGSSTGAVTSGNYPNWVQKKPGQAPRGLIGGTKFLAPGTPARFSGSLSGGKAALTLSGVQPEDEAEYYCVLWYSNRWVFGSGTKLTVLGGGGDKTHTCPPCPAPELLGGPSVFLFPPKPKDTLMISRTPEVTCVVVDVSHEDPEVKFNWYVDGVEVHNAKTKPCEEQYGSTYRCVSVLTVLHQDWLNGKEYKCKVSNKALPAPIEKTISKAKGQPREPQVYTLPPSREEMTKNQVSLTCLVKGFYPSDIAVEWESNGQPENNYKTTPPVLDSDGSFFLYSKLTVDKSRWQQGNVFSCSVMHEALHNHYTQKSLSLSPGKGGGGSGGGGSGGGGSGGGGSGGGGSGGGGSDKTHTCPPCPAPELLGGPSVFLFPPKPKDTLMISRTPEVTCVVVDVSHEDPEVKFNWYVDGVEVHNAKTKPCEEQYGSTYRCVSVLTVLHQDWLNGKEYKCKVSNKALPAPIEKTISKAKGQPREPQVYTLPPSREEMTKNQVSLTCLVKGFYPSDIAVEWESNGQPENNYKTTPPVLDSDGSFFLYSKLTVDKSRWQQGNVFSCSVMHEALHNHYTQKSLSLSPGK

SEQ ID NO: 246 - protein, 252 aa, Artificial; identical to SEQ ID NO: 243
  X3A / scFv I2C

SEQ ID NO: 247 - protein, 507 aa, Artificial
  X3A / bispecific MOL I2C
EIVLTQSPGTLSLSPGERATLSCRASQTVSSSYLVWYQQKPGQAPRLLIYGASSRATGIPDRFSGSGSGTDFTLIISRLEPEDFAVYYCQQYGGSPITFGCGTRLEIKGGGGSGGGGSGGGGSQVQLVQSGAEVKKPGASVKVSCKASGYTFTGYYMHWVRQAPGQCLEWMGWINPNSGDANYAQKFQGRVTMTRDTSISTAYMELSRLRSDDTAVYYCARDALIVVAPVTRDYYYYGMDVWGQGTTVTASSSGGGGSEVQLVESGGGLVQPGGSLKLSCAASGFTFNKYAMNWVRQAPGKGLEWVARIRSKYNNYATYYADSVKDRFTISRDDSKNTAYLQMNNLKTEDTAVYYCVRHGNFGNSYISYWAYWGQGTLVTVSSGGGGSGGGGSGGGGSQTVVTQEPSLTVSPGGTVTLTCGSSTGAVTSGNYPNWVQQKPGQAPRGLIGGTKFLAPGTPARFSGSLLGGKAALTLSGVQPEDEAEYYCVLWYSNRWVFGGGTKLTVL

SEQ ID NO: 248 - protein, 995 aa, Artificial
  X3A /HLE BITE I2C
EIVLTQSPGTLSLSPGERATLSCRASQTVSSSYLVWYQQKPGQAPRLLIYGASSRATGIPDRFSGSGSGTDFTLIISRLEPEDFAVYYCQQYGGSPITFGCGTRLEIKGGGGSGGGGSGGGGSQVQLVQSGAEVKKPGASVKVSCKASGYTFTGYYMHWVRQAPGQCLEWMGWINPNSGDANYAQKFQGRVTMTRDTSISTAYMELSRLRSDDTAVYYCARDALIVVAPVTRDYYYYGMDVWGQGTTVTASSSGGGGSEVQLVESGGGLVQPGGSLKLSCAASGFTFNKYAMNWVRQAPGKGLEWVARIRSKYNNYATYYADSVKDRFTISRDDSKNTAYLQMNNLKTEDTAVYYCVRHGNFGNSYISYWAYWGQGTLVTVSSGGGGSGGGGSGGGGSQTVVTQEPSLTVSPGGTVTLTCGSSTGAVTSGNYPNWVQQKPGQAPRGLIGGTKFLAPGTPARFSGSLLGGKAALTLSGVQPEDEAEYYCVLWYSNRWVFGGGTKLTVLGGGGDKTHTCPPCPAPELLGGPSVFLFPPKPKDTLMISRTPEVTCVVVDVSHEDPEVKFNWYVDGVEVHNAKTKPCEEQYGSTYRCVSVLTVLHQDWLNGKEYKCKVSNKALPAPIEKTISKAKGQPREPQVYTLPPSREEMTKNQVSLTCLVKGFYPSDIAVEWESNGQPENNYKTTPPVLDSDGSFFLYSKLTVDKSRWQQGNVFSCSVMHEALHNHYTQKSLSLSPGKGGGGSGGGGSGGGGSGGGGSGGGGSGGGGSDKTHTCPPCPAPELLGGPSVFLFPPKPKDTLMISRTPEVTCVVVDVSHEDPEVKFNWYVDGVEVHNAKTKPCEEQYGSTYRCVSVLTVLHQDWLNGKEYKCKVSNKALPAPIEKTISKAKGQPREPQVYTLPPSREEMTKNQVSLTCLVKGFYPSDIAVEWESNGQPENNYKTTPPVLDSDGSFFLYSKLTVDKSRWQQGNVFSCSVMHEALHNHYTQKSLSLSPGK

SEQ ID NO: 249 - protein, 129 aa, Artificial; identical to SEQ ID NO: 235
  VH of S9W

SEQ ID NO: 250 - protein, 108 aa, Artificial; identical to SEQ ID NO: 12
  VL of S9W

SEQ ID NO: 251 - protein, 5 aa, Artificial
  CDR-H1 of S9W
GYYMH

SEQ ID NO: 252 - protein, 17 aa, Artificial
  CDR-H2 of S9W
WINPNSGDANYAQKFQG

SEQ ID NO: 253 - protein, 20 aa, Artificial
  CDR-H3 of S9W
DALIVVAPVTRDYYYYGMDV

SEQ ID NO: 254 - protein, 12 aa, Artificial
  CDR-L1 of S9W
RASQSVSSSYLA

SEQ ID NO: 255 - protein, 7 aa, Artificial
  CDR-L2 of S9W
GASSRAT

SEQ ID NO: 256 - protein, 9 aa, Artificial
  CDR-L3 of S9W
QQYGSSPLT

SEQ ID NO: 257 - protein, 252 aa, Artificial
  S9W / scFv I2E
EIVLTQSPGTLSLSPGERATLSCRASQSVSSSYLAWYQQKPGQAPRLLIYGASSRATGIPDRFSGSGSGTDFTLTISRLEPEDFAVYYCQQYGSSPLTFGCGTKLEIKGGGGSGGGGSGGGGSQVQLVQSGAEVKKPGASVKVSCKASGYTFTGYYMHWVRQAPGQCLEWMGWINPNSGDANYAQKFQGRVTMTRDTSISTAYMELSRLRSDDTAVYYCARDALIVVAPVTRDYYYYGMDVWGQGTTVTASS

SEQ ID NO: 258 - skipped

SEQ ID NO: 259 - protein, 995 aa, Artificial
  S9W / HLE-BITE I2E
EIVLTQSPGTLSLSPGERATLSCRASQSVSSSYLAWYQQKPGQAPRLLIYGASSRATGIPDRFSGSGSGTDFTLTISRLEPEDFAVYYCQQYGSSPLTFGCGTKLEIKGGGGSGGGGSGGGGSQVQLVQSGAEVKKPGASVKVSCKASGYTFTGYYMHWVRQAPGQCLEWMGWINPNSGDANYAQKFQGRVTMTRDTSISTAYMELSRLRSDDTAVYYCARDALIVVAPVTRDYYYYGMDVWGQGTTVTASSSGGGGSEVQLVESGGGLVQPGGSLKLSCAASGFTFNKYAINWVRQAPGKGLEWVARIRSKYNNYATYYADAVKDRFTISRDDSKNTVYLQMNNLKTEDTAVYYCARAGNFGSSYISYWAYWGQGTLVTVSSGGGGSGGGGSGGGGSQTVVTQEPSLTVSPGGTVTITCGSSTGAVTSGNYPNWVQKKPGQAPRGLIGGTKFLAPGTPARFSGSLSGGKAALTLSGVQPEDEAEYYCVLWYSNRWVFGSGTKLTVLGGGGDKTHTCPPCPAPELLGGPSVFLFPPKPKDTLMISRTPEVTCVVVDVSHEDPEVKFNWYVDGVEVHNAKTKPCEEQYGSTYRCVSVLTVLHQDWLNGKEYKCKVSNKALPAPIEKTISKAKGQPREPQVYTLPPSREEMTKNQVSLTCLVKGFYPSDIAVEWESNGQPENNYKTTPPVLDSDGSFFLYSKLTVDKSRWQQGNVFSCSVMHEALHNHYTQKSLSLSPGKGGGGSGGGGSGGGGSGGGGSGGGGSGGGGSDKTHTCPPCPAPELLGGPSVFLFPPKPKDTLMISRTPEVTCVVVDVSHEDPEVKFNWYVDGVEVHNAKTKPCEEQYGSTYRCVSVLTVLHQDWLNGKEYKCKVSNKALPAPIEKTISKAKGQPREPQVYTLPPSREEMTKNQVSLTCLVKGFYPSDIAVEWESNGQPENNYKTTPPVLDSDGSFFLYSKLTVDKSRWQQGNVFSCSVMHEALHNHYTQKSLSLSPGK

SEQ ID NO: 260 - protein, 252 aa, Artificial; identical to SEQ ID NO: 257
  S9W / scFv I2C

SEQ ID NO: 261 - protein, 507 aa, Artificial
  S9W / bispecific MOL I2C
EIVLTQSPGTLSLSPGERATLSCRASQSVSSSYLAWYQQKPGQAPRLLIYGASSRATGIPDRFSGSGSGTDFTLTISRLEPEDFAVYYCQQYGSSPLTFGCGTKLEIKGGGGSGGGGSGGGGSQVQLVQSGAEVKKPGASVKVSCKASGYTFTGYYMHWVRQAPGQCLEWMGWINPNSGDANYAQKFQGRVTMTRDTSISTAYMELSRLRSDDTAVYYCARDALIVVAPVTRDYYYYGMDVWGQGTTVTASSSGGGGSEVQLVESGGGLVQPGGSLKLSCAASGFTFNKYAMNWVRQAPGKGLEWVARIRSKYNNYATYYADSVKDRFTISRDDSKNTAYLQMNNLKTEDTAVYYCVRHGNFGNSYISYWAYWGQGTLVTVSSGGGGSGGGGSGGGGSQTVVTQEPSLTVSPGGTVTLTCGSSTGAVTSGNYPNWVQQKPGQAPRGLIGGTKFLAPGTPARFSGSLLGGKAALTLSGVQPEDEAEYYCVLWYSNRWVFGGGTKLTVL

SEQ ID NO: 262 - protein, 995 aa, Artificial
  S9W / HLE BITE I2C
EIVLTQSPGTLSLSPGERATLSCRASQSVSSSYLAWYQQKPGQAPRLLIYGASSRATGIPDRFSGSGSGTDFTLTISRLEPEDFAVYYCQQYGSSPLTFGCGTKLEIKGGGGSGGGGSGGGGSQVQLVQSGAEVKKPGASVKVSCKASGYTFTGYYMHWVRQAPGQCLEWMGWINPNSGDANYAQKFQGRVTMTRDTSISTAYMELSRLRSDDTAVYYCARDALIVVAPVTRDYYYYGMDVWGQGTTVTASSSGGGGSEVQLVESGGGLVQPGGSLKLSCAASGFTFNKYAMNWVRQAPGKGLEWVARIRSKYNNYATYYADSVKDRFTISRDDSKNTAYLQMNNLKTEDTAVYYCVRHGNFGNSYISYWAYWGQGTLVTVSSGGGGSGGGGSGGGGSQTVVTQEPSLTVSPGGTVTLTCGSSTGAVTSGNYPNWVQQKPGQAPRGLIGGTKFLAPGTPARFSGSLLGGKAALTLSGVQPEDEAEYYCVLWYSNRWVFGGGTKLTVLGGGGDKTHTCPPCPAPELLGGPSVFLFPPKPKDTLMISRTPEVTCVVVDVSHEDPEVKFNWYVDGVEVHNAKTKPCEEQYGSTYRCVSVLTVLHQDWLNGKEYKCKVSNKALPAPIEKTISKAKGQPREPQVYTLPPSREEMTKNQVSLTCLVKGFYPSDIAVEWESNGQPENNYKTTPPVLDSDGSFFLYSKLTVDKSRWQQGNVFSCSVMHEALHNHYTQKSLSLSPGKGGGGSGGGGSGGGGSGGGGSGGGGSGGGGSDKTHTCPPCPAPELLGGPSVFLFPPKPKDTLMISRTPEVTCVVVDVSHEDPEVKFNWYVDGVEVHNAKTKPCEEQYGSTYRCVSVLTVLHQDWLNGKEYKCKVSNKALPAPIEKTISKAKGQPREPQVYTLPPSREEMTKNQVSLTCLVKGFYPSDIAVEWESNGQPENNYKTTPPVLDSDGSFFLYSKLTVDKSRWQQGNVFSCSVMHEALHNHYTQKSLSLSPGK

SEQ ID NO: 263 - protein, 129 aa, Artificial
  VH of I7L
QVQLVQSGAEVKKPGASVKVSCKASGYTFTGYYVHWVRQAPGQCLEWMGWINPNSGATNYAQKFQGRVTMTRDTSISTAYMELSRLRSVDTAVYYCVRDGLIVEAPATRDYYYYGMDVWGQGTTVTVSS

SEQ ID NO: 264 - protein, 108 aa, Artificial
  VL of I7L
EIVLTQSPGTLSLSPGERATLSCRASQSVRSTYLAWYQQTPGQAPRLLISGASSRATGIPDRFSGSGSGTDFILTISRLEPEDFAVYYCQQYDTSPITFGCGTRLEIK

SEQ ID NO: 265 - protein, 5 aa, Artificial
  CDR-H1 of I7L
GYYVH

SEQ ID NO: 266 - protein, 17 aa, Artificial
  CDR-H2 of I7L
WINPNSGATNYAQKFQG

SEQ ID NO: 267 - protein, 20 aa, Artificial
  CDR-H3 of I7L
DGLIVEAPATRDYYYYGMDV

SEQ ID NO: 268 - protein, 12 aa, Artificial
  CDR-L1 of I7L
RASQSVRSTYLA

SEQ ID NO: 269 - protein, 7 aa, Artificial
  CDR-L2 of I7L
GASSRAT

SEQ ID NO: 270 - protein, 9 aa, Artificial
  CDR-L3 of I7L
QQYDTSPIT

SEQ ID NO: 271 - protein, 252 aa, Artificial
  I7L / scFv I2E
QVQLVQSGAEVKKPGASVKVSCKASGYTFTGYYVHWVRQAPGQCLEWMGWINPNSGATNYAQKFQGRVTMTRDTSISTAYMELSRLRSVDTAVYYCVRDGLIVEAPATRDYYYYGMDVWGQGTTVTVSSGGGGSGGGGSGGGGSEIVLTQSPGTLSLSPGERATLSCRASQSVRSTYLAWYQQTPGQAPRLLISGASSRATGIPDRFSGSGSGTDFILTISRLEPEDFAVYYCQQYDTSPITFGCGTRLEIK

SEQ ID NO: 272 - protein, 507 aa, Artificial
  I7L / bispecific MOL I2E
QVQLVQSGAEVKKPGASVKVSCKASGYTFTGYYVHWVRQAPGQCLEWMGWINPNSGATNYAQKFQGRVTMTRDTSISTAYMELSRLRSVDTAVYYCVRDGLIVEAPATRDYYYYGMDVWGQGTTVTVSSGGGGSGGGGSGGGGSEIVLTQSPGTLSLSPGERATLSCRASQSVRSTYLAWYQQTPGQAPRLLISGASSRATGIPDRFSGSGSGTDFILTISRLEPEDFAVYYCQQYDTSPITFGCGTRLEIKSGGGGSEVQLVESGGGLVQPGGSLKLSCAASGFTFNKYAINWVRQAPGKGLEWVARIRSKYNNYATYYADAVKDRFTISRDDSKNTVYLQMNNLKTEDTAVYYCARAGNFGSSYISYWAYWGQGTLVTVSSGGGGSGGGGSGGGGSQTVVTQEPSLTVSPGGTVTITCGSSTGAVTSGNYPNWVQKKPGQAPRGLIGGTKFLAPGTPARFSGSLSGGKAALTLSGVQPEDEAEYYCVLWYSNRWVFGSGTKLTVL

SEQ ID NO: 273 - protein, 995 aa, Artificial
  I7L / HLE-BITE I2E
QVQLVQSGAEVKKPGASVKVSCKASGYTFTGYYVHWVRQAPGQCLEWMGWINPNSGATNYAQKFQGRVTMTRDTSISTAYMELSRLRSVDTAVYYCVRDGLIVEAPATRDYYYYGMDVWGQGTTVTVSSGGGGSGGGGSGGGGSEIVLTQSPGTLSLSPGERATLSCRASQSVRSTYLAWYQQTPGQAPRLLISGASSRATGIPDRFSGSGSGTDFILTISRLEPEDFAVYYCQQYDTSPITFGCGTRLEIKSGGGGSEVQLVESGGGLVQPGGSLKLSCAASGFTFNKYAINWVRQAPGKGLEWVARIRSKYNNYATYYADAVKDRFTISRDDSKNTVYLQMNNLKTEDTAVYYCARAGNFGSSYISYWAYWGQGTLVTVSSGGGGSGGGGSGGGGSQTVVTQEPSLTVSPGGTVTITCGSSTGAVTSGNYPNWVQKKPGQAPRGLIGGTKFLAPGTPARFSGSLSGGKAALTLSGVQPEDEAEYYCVLWYSNRWVFGSGTKLTVLGGGGDKTHTCPPCPAPELLGGPSVFLFPPKPKDTLMISRTPEVTCVVVDVSHEDPEVKFNWYVDGVEVHNAKTKPCEEQYGSTYRCVSVLTVLHQDWLNGKEYKCKVSNKALPAPIEKTISKAKGQPREPQVYTLPPSREEMTKNQVSLTCLVKGFYPSDIAVEWESNGQPENNYKTTPPVLDSDGSFFLYSKLTVDKSRWQQGNVFSCSVMHEALHNHYTQKSLSLSPGKGGGGSGGGGSGGGGSGGGGSGGGGSGGGGSDKTHTCPPCPAPELLGGPSVFLFPPKPKDTLMISRTPEVTCVVVDVSHEDPEVKFNWYVDGVEVHNAKTKPCEEQYGSTYRCVSVLTVLHQDWLNGKEYKCKVSNKALPAPIEKTISKAKGQPREPQVYTLPPSREEMTKNQVSLTCLVKGFYPSDIAVEWESNGQPENNYKTTPPVLDSDGSFFLYSKLTVDKSRWQQGNVFSCSVMHEALHNHYTQKSLSLSPGK

SEQ ID NO: 274 - protein, 252 aa, Artificial; identical to SEQ ID NO: 271
  I7L / scFv I2C

SEQ ID NO: 275 - protein, 507 aa, Artificial
  I7L / bispecific MOL I2C
QVQLVQSGAEVKKPGASVKVSCKASGYTFTGYYVHWVRQAPGQCLEWMGWINPNSGATNYAQKFQGRVTMTRDTSISTAYMELSRLRSVDTAVYYCVRDGLIVEAPATRDYYYYGMDVWGQGTTVTVSSGGGGSGGGGSGGGGSEIVLTQSPGTLSLSPGERATLSCRASQSVRSTYLAWYQQTPGQAPRLLISGASSRATGIPDRFSGSGSGTDFILTISRLEPEDFAVYYCQQYDTSPITFGCGTRLEIKSGGGGSEVQLVESGGGLVQPGGSLKLSCAASGFTFNKYAMNWVRQAPGKGLEWVARIRSKYNNYATYYADSVKDRFTISRDDSKNTAYLQMNNLKTEDTAVYYCVRHGNFGNSYISYWAYWGQGTLVTVSSGGGGSGGGGSGGGGSQTVVTQEPSLTVSPGGTVTLTCGSSTGAVTSGNYPNWVQQKPGQAPRGLIGGTKFLAPGTPARFSGSLLGGKAALTLSGVQPEDEAEYYCVLWYSNRWVFGGGTKLTVL

SEQ ID NO: 276 - protein, 995 aa, Artificial
  I7L / HLE BITE I2C
QVQLVQSGAEVKKPGASVKVSCKASGYTFTGYYVHWVRQAPGQCLEWMGWINPNSGATNYAQKFQGRVTMTRDTSISTAYMELSRLRSVDTAVYYCVRDGLIVEAPATRDYYYYGMDVWGQGTTVTVSSGGGGSGGGGSGGGGSEIVLTQSPGTLSLSPGERATLSCRASQSVRSTYLAWYQQTPGQAPRLLISGASSRATGIPDRFSGSGSGTDFILTISRLEPEDFAVYYCQQYDTSPITFGCGTRLEIKSGGGGSEVQLVESGGGLVQPGGSLKLSCAASGFTFNKYAMNWVRQAPGKGLEWVARIRSKYNNYATYYADSVKDRFTISRDDSKNTAYLQMNNLKTEDTAVYYCVRHGNFGNSYISYWAYWGQGTLVTVSSGGGGSGGGGSGGGGSQTVVTQEPSLTVSPGGTVTLTCGSSTGAVTSGNYPNWVQQKPGQAPRGLIGGTKFLAPGTPARFSGSLLGGKAALTLSGVQPEDEAEYYCVLWYSNRWVFGGGTKLTVLGGGGDKTHTCPPCPAPELLGGPSVFLFPPKPKDTLMISRTPEVTCVVVDVSHEDPEVKFNWYVDGVEVHNAKTKPCEEQYGSTYRCVSVLTVLHQDWLNGKEYKCKVSNKALPAPIEKTISKAKGQPREPQVYTLPPSREEMTKNQVSLTCLVKGFYPSDIAVEWESNGQPENNYKTTPPVLDSDGSFFLYSKLTVDKSRWQQGNVFSCSVMHEALHNHYTQKSLSLSPGKGGGGSGGGGSGGGGSGGGGSGGGGSGGGGSDKTHTCPPCPAPELLGGPSVFLFPPKPKDTLMISRTPEVTCVVVDVSHEDPEVKFNWYVDGVEVHNAKTKPCEEQYGSTYRCVSVLTVLHQDWLNGKEYKCKVSNKALPAPIEKTISKAKGQPREPQVYTLPPSREEMTKNQVSLTCLVKGFYPSDIAVEWESNGQPENNYKTTPPVLDSDGSFFLYSKLTVDKSRWQQGNVFSCSVMHEALHNHYTQKSLSLSPGK

SEQ ID NO: 277 - protein, 129 aa, Artificial
  VH of W5F
QVQLVQSGAEVKKPGASVKVSCKASGYTFTGYYMHWVRQAPGQCLEWMGWINPNSGDTNYAQKFQGRVTMTRDTSISTAYMELSRLRSDDTAVYYCARDGLIVVAPVTRDYYYYGMDVWGQGTTVTASS

SEQ ID NO: 278 - protein, 108 aa, Artificial; identical to SEQ ID NO: 236
  VL of W5F

SEQ ID NO: 279 - protein, 5 aa, Artificial
  CDR-H1 of W5F
GYYMH

SEQ ID NO: 280 - protein, 17 aa, Artificial
  CDR-H2 of W5F
WINPNSGDTNYAQKFQG

SEQ ID NO: 281 - protein, 20 aa, Artificial
  CDR-H3 of W5F
DGLIVVAPVTRDYYYYGMDV

SEQ ID NO: 282 - protein, 12 aa, Artificial
  CDR-L1 of W5F
RASQTVSSSYLV

SEQ ID NO: 283 - protein, 7 aa, Artificial
  CDR-L2 of W5F
GASSRAT

SEQ ID NO: 284 - protein, 9 aa, Artificial
  CDR-L3 of W5F
QQYGGSPIT

SEQ ID NO: 285 - protein, 252 aa, Artificial
  W5F / SCFV I2E
EIVLTQSPGTLSLSPGERATLSCRASQTVSSSYLVWYQQKPGQAPRLLIYGASSRATGIPDRFSGSGSGTDFTLIISRLEPEDFAVYYCQQYGGSPITFGCGTRLEIKGGGGSGGGGSGGGGSQVQLVQSGAEVKKPGASVKVSCKASGYTFTGYYMHWVRQAPGQCLEWMGWINPNSGDTNYAQKFQGRVTMTRDTSISTAYMELSRLRSDDTAVYYCARDGLIVVAPVTRDYYYYGMDVWGQGTTVTASS

SEQ ID NO: 286 - protein, 507 aa, Artificial
  W5F / bispecific MOL I2E
EIVLTQSPGTLSLSPGERATLSCRASQTVSSSYLVWYQQKPGQAPRLLIYGASSRATGIPDRFSGSGSGTDFTLIISRLEPEDFAVYYCQQYGGSPITFGCGTRLEIKGGGGSGGGGSGGGGSQVQLVQSGAEVKKPGASVKVSCKASGYTFTGYYMHWVRQAPGQCLEWMGWINPNSGDTNYAQKFQGRVTMTRDTSISTAYMELSRLRSDDTAVYYCARDGLIVVAPVTRDYYYYGMDVWGQGTTVTASSSGGGGSEVQLVESGGGLVQPGGSLKLSCAASGFTFNKYAINWVRQAPGKGLEWVARIRSKYNNYATYYADAVKDRFTISRDDSKNTVYLQMNNLKTEDTAVYYCARAGNFGSSYISYWAYWGQGTLVTVSSGGGGSGGGGSGGGGSQTVVTQEPSLTVSPGGTVTITCGSSTGAVTSGNYPNWVQKKPGQAPRGLIGGTKFLAPGTPARFSGSLSGGKAALTLSGVQPEDEAEYYCVLWYSNRWVFGSGTKLTVL

SEQ ID NO: 287 - protein, 995 aa, Artificial
  W5F / HLE-BITE I2E
EIVLTQSPGTLSLSPGERATLSCRASQTVSSSYLVWYQQKPGQAPRLLIYGASSRATGIPDRFSGSGSGTDFTLIISRLEPEDFAVYYCQQYGGSPITFGCGTRLEIKGGGGSGGGGSGGGGSQVQLVQSGAEVKKPGASVKVSCKASGYTFTGYYMHWVRQAPGQCLEWMGWINPNSGDTNYAQKFQGRVTMTRDTSISTAYMELSRLRSDDTAVYYCARDGLIVVAPVTRDYYYYGMDVWGQGTTVTASSSGGGGSEVQLVESGGGLVQPGGSLKLSCAASGFTFNKYAINWVRQAPGKGLEWVARIRSKYNNYATYYADAVKDRFTISRDDSKNTVYLQMNNLKTEDTAVYYCARAGNFGSSYISYWAYWGQGTLVTVSSGGGGSGGGGSGGGGSQTVVTQEPSLTVSPGGTVTITCGSSTGAVTSGNYPNWVQKKPGQAPRGLIGGTKFLAPGTPARFSGSLSGGKAALTLSGVQPEDEAEYYCVLWYSNRWVFGSGTKLTVLGGGGDKTHTCPPCPAPELLGGPSVFLFPPKPKDTLMISRTPEVTCVVVDVSHEDPEVKFNWYVDGVEVHNAKTKPCEEQYGSTYRCVSVLTVLHQDWLNGKEYKCKVSNKALPAPIEKTISKAKGQPREPQVYTLPPSREEMTKNQVSLTCLVKGFYPSDIAVEWESNGQPENNYKTTPPVLDSDGSFFLYSKLTVDKSRWQQGNVFSCSVMHEALHNHYTQKSLSLSPGKGGGGSGGGGSGGGGSGGGGSGGGGSGGGGSDKTHTCPPCPAPELLGGPSVFLFPPKPKDTLMISRTPEVTCVVVDVSHEDPEVKFNWYVDGVEVHNAKTKPCEEQYGSTYRCVSVLTVLHQDWLNGKEYKCKVSNKALPAPIEKTISKAKGQPREPQVYTLPPSREEMTKNQVSLTCLVKGFYPSDIAVEWESNGQPENNYKTTPPVLDSDGSFFLYSKLTVDKSRWQQGNVFSCSVMHEALHNHYTQKSLSLSPGK

SEQ ID NO: 288 - protein, 252 aa, Artificial; identical to SEQ ID NO: 285
  W5F / scFv I2C

SEQ ID NO: 289 - protein, 507 aa, Artificial
  W5F / bispecific MOL I2C
EIVLTQSPGTLSLSPGERATLSCRASQTVSSSYLVWYQQKPGQAPRLLIYGASSRATGIPDRFSGSGSGTDFTLIISRLEPEDFAVYYCQQYGGSPITFGCGTRLEIKGGGGSGGGGSGGGGSQVQLVQSGAEVKKPGASVKVSCKASGYTFTGYYMHWVRQAPGQCLEWMGWINPNSGDTNYAQKFQGRVTMTRDTSISTAYMELSRLRSDDTAVYYCARDGLIVVAPVTRDYYYYGMDVWGQGTTVTASSSGGGGSEVQLVESGGGLVQPGGSLKLSCAASGFTFNKYAMNWVRQAPGKGLEWVARIRSKYNNYATYYADSVKDRFTISRDDSKNTAYLQMNNLKTEDTAVYYCVRHGNFGNSYISYWAYWGQGTLVTVSSGGGGSGGGGSGGGGSQTVVTQEPSLTVSPGGTVTLTCGSSTGAVTSGNYPNWVQQKPGQAPRGLIGGTKFLAPGTPARFSGSLLGGKAALTLSGVQPEDEAEYYCVLWYSNRWVFGGGTKLTVL

SEQ ID NO: 290 - protein, 995 aa, Artificial
  W5F / HLE BITE I2C
EIVLTQSPGTLSLSPGERATLSCRASQTVSSSYLVWYQQKPGQAPRLLIYGASSRATGIPDRFSGSGSGTDFTLIISRLEPEDFAVYYCQQYGGSPITFGCGTRLEIKGGGGSGGGGSGGGGSQVQLVQSGAEVKKPGASVKVSCKASGYTFTGYYMHWVRQAPGQCLEWMGWINPNSGDTNYAQKFQGRVTMTRDTSISTAYMELSRLRSDDTAVYYCARDGLIVVAPVTRDYYYYGMDVWGQGTTVTASSSGGGGSEVQLVESGGGLVQPGGSLKLSCAASGFTFNKYAMNWVRQAPGKGLEWVARIRSKYNNYATYYADSVKDRFTISRDDSKNTAYLQMNNLKTEDTAVYYCVRHGNFGNSYISYWAYWGQGTLVTVSSGGGGSGGGGSGGGGSQTVVTQEPSLTVSPGGTVTLTCGSSTGAVTSGNYPNWVQQKPGQAPRGLIGGTKFLAPGTPARFSGSLLGGKAALTLSGVQPEDEAEYYCVLWYSNRWVFGGGTKLTVLGGGGDKTHTCPPCPAPELLGGPSVFLFPPKPKDTLMISRTPEVTCVVVDVSHEDPEVKFNWYVDGVEVHNAKTKPCEEQYGSTYRCVSVLTVLHQDWLNGKEYKCKVSNKALPAPIEKTISKAKGQPREPQVYTLPPSREEMTKNQVSLTCLVKGFYPSDIAVEWESNGQPENNYKTTPPVLDSDGSFFLYSKLTVDKSRWQQGNVFSCSVMHEALHNHYTQKSLSLSPGKGGGGSGGGGSGGGGSGGGGSGGGGSGGGGSDKTHTCPPCPAPELLGGPSVFLFPPKPKDTLMISRTPEVTCVVVDVSHEDPEVKFNWYVDGVEVHNAKTKPCEEQYGSTYRCVSVLTVLHQDWLNGKEYKCKVSNKALPAPIEKTISKAKGQPREPQVYTLPPSREEMTKNQVSLTCLVKGFYPSDIAVEWESNGQPENNYKTTPPVLDSDGSFFLYSKLTVDKSRWQQGNVFSCSVMHEALHNHYTQKSLSLSPGK

SEQ ID NO: 291 - protein, 126 aa, Artificial
  VH of K4Y
QVQLVQSGAEVKKPGASVKVSCKASGYTFTDYHMHWVRQAPGQCLEWMGWIKPISGDANYAQKFQGRVTMTRDTSISTAYMELSRLRSDDTAVYYCARDYYSSSYTLYYYYGMDVWGQGTTVTVSS

SEQ ID NO: 292 - protein, 110 aa, Artificial
  VL of K4Y
QSALTQPPSASGSPGQSVTISCTGTSSDVGGYNYVSWYQQHPGKAPKLMIYEVSKRPSGVPDRFSGSKSGNTASLTVSGLQAEDEADYYCSSYAGSNNFVFGCGTKVTVL

SEQ ID NO: 293 - protein, 5 aa, Artificial
  CDR-H1 of K4Y
DYHMH

SEQ ID NO: 294 - protein, 17 aa, Artificial
  CDR-H2 of K4Y
WIKPISGDANYAQKFQG

SEQ ID NO: 295 - protein, 17 aa, Artificial
  CDR-H3 of K4Y
DYYSSSYTLYYYYGMDV

SEQ ID NO: 296 - protein, 14 aa, Artificial
  CDR-L1 of K4Y
TGTSSDVGGYNYVS

SEQ ID NO: 297 - protein, 7 aa, Artificial
  CDR-L2 of K4Y
EVSKRPS

SEQ ID NO: 298 - protein, 10 aa, Artificial
  CDR-L3 of K4Y
SSYAGSNNFV

SEQ ID NO: 299 - protein, 251 aa, Artificial
  K4Y / scFv I2E
QVQLVQSGAEVKKPGASVKVSCKASGYTFTDYHMHWVRQAPGQCLEWMGWIKPISGDANYAQKFQGRVTMTRDTSISTAYMELSRLRSDDTAVYYCARDYYSSSYTLYYYYGMDVWGQGTTVTVSSGGGGSGGGGSGGGGSQSALTQPPSASGSPGQSVTISCTGTSSDVGGYNYVSWYQQHPGKAPKLMIYEVSKRPSGVPDRFSGSKSGNTASLTVSGLQAEDEADYYCSSYAGSNNFVFGCGTKVTVL

SEQ ID NO: 300 - protein, 506 aa, Artificial
  K4Y / bispecific MOL I2E
QVQLVQSGAEVKKPGASVKVSCKASGYTFTDYHMHWVRQAPGQCLEWMGWIKPISGDANYAQKFQGRVTMTRDTSISTAYMELSRLRSDDTAVYYCARDYYSSSYTLYYYYGMDVWGQGTTVTVSSGGGGSGGGGSGGGGSQSALTQPPSASGSPGQSVTISCTGTSSDVGGYNYVSWYQQHPGKAPKLMIYEVSKRPSGVPDRFSGSKSGNTASLTVSGLQAEDEADYYCSSYAGSNNFVFGCGTKVTVLSGGGGSEVQLVESGGGLVQPGGSLKLSCAASGFTFNKYAINWVRQAPGKGLEWVARIRSKYNNYATYYADAVKDRFTISRDDSKNTVYLQMNNLKTEDTAVYYCARAGNFGSSYISYWAYWGQGTLVTVSSGGGGSGGGGSGGGGSQTVVTQEPSLTVSPGGTVTITCGSSTGAVTSGNYPNWVQKKPGQAPRGLIGGTKFLAPGTPARFSGSLSGGKAALTLSGVQPEDEAEYYCVLWYSNRWVFGSGTKLTVL

SEQ ID NO: 301 - protein, 994 aa, Artificial
  K4Y / HLE-BITE I2E
QVQLVQSGAEVKKPGASVKVSCKASGYTFTDYHMHWVRQAPGQCLEWMGWIKPISGDANYAQKFQGRVTMTRDTSISTAYMELSRLRSDDTAVYYCARDYYSSSYTLYYYYGMDVWGQGTTVTVSSGGGGSGGGGSGGGGSQSALTQPPSASGSPGQSVTISCTGTSSDVGGYNYVSWYQQHPGKAPKLMIYEVSKRPSGVPDRFSGSKSGNTASLTVSGLQAEDEADYYCSSYAGSNNFVFGCGTKVTVLSGGGGSEVQLVESGGGLVQPGGSLKLSCAASGFTFNKYAINWVRQAPGKGLEWVARIRSKYNNYATYYADAVKDRFTISRDDSKNTVYLQMNNLKTEDTAVYYCARAGNFGSSYISYWAYWGQGTLVTVSSGGGGSGGGGSGGGGSQTVVTQEPSLTVSPGGTVTITCGSSTGAVTSGNYPNWVQKKPGQAPRGLIGGTKFLAPGTPARFSGSLSGGKAALTLSGVQPEDEAEYYCVLWYSNRWVFGSGTKLTVLGGGGDKTHTCPPCPAPELLGGPSVFLFPPKPKDTLMISRTPEVTCVVVDVSHEDPEVKFNWYVDGVEVHNAKTKPCEEQYGSTYRCVSVLTVLHQDWLNGKEYKCKVSNKALPAPIEKTISKAKGQPREPQVYTLPPSREEMTKNQVSLTCLVKGFYPSDIAVEWESNGQPENNYKTTPPVLDSDGSFFLYSKLTVDKSRWQQGNVFSCSVMHEALHNHYTQKSLSLSPGKGGGGSGGGGSGGGGSGGGGSGGGGSGGGGSDKTHTCPPCPAPELLGGPSVFLFPPKPKDTLMISRTPEVTCVVVDVSHEDPEVKFNWYVDGVEVHNAKTKPCEEQYGSTYRCVSVLTVLHQDWLNGKEYKCKVSNKALPAPIEKTISKAKGQPREPQVYTLPPSREEMTKNQVSLTCLVKGFYPSDIAVEWESNGQPENNYKTTPPVLDSDGSFFLYSKLTVDKSRWQQGNVFSCSVMHEALHNHYTQKSLSLSPGK

SEQ ID NO: 302 - protein, 251 aa, Artificial; identical to SEQ ID NO: 299
  K4Y / scFv I2C

SEQ ID NO: 303 - protein, 506 aa, Artificial
  K4Y / bispecific MOL I2C
QVQLVQSGAEVKKPGASVKVSCKASGYTFTDYHMHWVRQAPGQCLEWMGWIKPISGDANYAQKFQGRVTMTRDTSISTAYMELSRLRSDDTAVYYCARDYYSSSYTLYYYYGMDVWGQGTTVTVSSGGGGSGGGGSGGGGSQSALTQPPSASGSPGQSVTISCTGTSSDVGGYNYVSWYQQHPGKAPKLMIYEVSKRPSGVPDRFSGSKSGNTASLTVSGLQAEDEADYYCSSYAGSNNFVFGCGTKVTVLSGGGGSEVQLVESGGGLVQPGGSLKLSCAASGFTFNKYAMNWVRQAPGKGLEWVARIRSKYNNYATYYADSVKDRFTISRDDSKNTAYLQMNNLKTEDTAVYYCVRHGNFGNSYISYWAYWGQGTLVTVSSGGGGSGGGGSGGGGSQTVVTQEPSLTVSPGGTVTLTCGSSTGAVTSGNYPNWVQQKPGQAPRGLIGGTKFLAPGTPARFSGSLLGGKAALTLSGVQPEDEAEYYCVLWYSNRWVFGGGTKLTVL

SEQ ID NO: 304 - protein, 994 aa, Artificial
  K4Y / HLE BITE I2C
QVQLVQSGAEVKKPGASVKVSCKASGYTFTDYHMHWVRQAPGQCLEWMGWIKPISGDANYAQKFQGRVTMTRDTSISTAYMELSRLRSDDTAVYYCARDYYSSSYTLYYYYGMDVWGQGTTVTVSSGGGGSGGGGSGGGGSQSALTQPPSASGSPGQSVTISCTGTSSDVGGYNYVSWYQQHPGKAPKLMIYEVSKRPSGVPDRFSGSKSGNTASLTVSGLQAEDEADYYCSSYAGSNNFVFGCGTKVTVLSGGGGSEVQLVESGGGLVQPGGSLKLSCAASGFTFNKYAMNWVRQAPGKGLEWVARIRSKYNNYATYYADSVKDRFTISRDDSKNTAYLQMNNLKTEDTAVYYCVRHGNFGNSYISYWAYWGQGTLVTVSSGGGGSGGGGSGGGGSQTVVTQEPSLTVSPGGTVTLTCGSSTGAVTSGNYPNWVQQKPGQAPRGLIGGTKFLAPGTPARFSGSLLGGKAALTLSGVQPEDEAEYYCVLWYSNRWVFGGGTKLTVLGGGGDKTHTCPPCPAPELLGGPSVFLFPPKPKDTLMISRTPEVTCVVVDVSHEDPEVKFNWYVDGVEVHNAKTKPCEEQYGSTYRCVSVLTVLHQDWLNGKEYKCKVSNKALPAPIEKTISKAKGQPREPQVYTLPPSREEMTKNQVSLTCLVKGFYPSDIAVEWESNGQPENNYKTTPPVLDSDGSFFLYSKLTVDKSRWQQGNVFSCSVMHEALHNHYTQKSLSLSPGKGGGGSGGGGSGGGGSGGGGSGGGGSGGGGSDKTHTCPPCPAPELLGGPSVFLFPPKPKDTLMISRTPEVTCVVVDVSHEDPEVKFNWYVDGVEVHNAKTKPCEEQYGSTYRCVSVLTVLHQDWLNGKEYKCKVSNKALPAPIEKTISKAKGQPREPQVYTLPPSREEMTKNQVSLTCLVKGFYPSDIAVEWESNGQPENNYKTTPPVLDSDGSFFLYSKLTVDKSRWQQGNVFSCSVMHEALHNHYTQKSLSLSPGK

SEQ ID NO: 305 - protein, 126 aa, Artificial
  VH of M4B
QVQLVQSGAEVKKPGASVKVSCKASGYTFTDYHMHWVRQAPGQCLEWMGWIKPISGDANYAQKFQGRVTMTRDTSISTAYMELSRLRSDDTAVYYCARDAYSSSWTLYYYYGMDVWGQGTTVTVSS

SEQ ID NO: 306 - protein, 110 aa, Artificial; identical to SEQ ID NO: 292
  VL of M4B

SEQ ID NO: 307 - protein, 5 aa, Artificial
  CDR-H1 of M4B
DYHMH

SEQ ID NO: 308 - protein, 17 aa, Artificial
  CDR-H2 of M4B
WIKPISGDANYAQKFQG

SEQ ID NO: 309 - protein, 17 aa, Artificial
  CDR-H3 of M4B
DAYSSSWTLYYYYGMDV

SEQ ID NO: 310 - protein, 14 aa, Artificial
  CDR-L1 of M4B
TGTSSDVGGYNYVS

SEQ ID NO: 311 - protein, 7 aa, Artificial
  CDR-L2 of M4B
EVSKRPS

SEQ ID NO: 312 - protein, 10 aa, Artificial
  CDR-L3 of M4B
SSYAGSNNFV

SEQ ID NO: 313 - protein, 251 aa, Artificial
  M4B / scFv I2E
QVQLVQSGAEVKKPGASVKVSCKASGYTFTDYHMHWVRQAPGQCLEWMGWIKPISGDANYAQKFQGRVTMTRDTSISTAYMELSRLRSDDTAVYYCARDAYSSSWTLYYYYGMDVWGQGTTVTVSSGGGGSGGGGSGGGGSQSALTQPPSASGSPGQSVTISCTGTSSDVGGYNYVSWYQQHPGKAPKLMIYEVSKRPSGVPDRFSGSKSGNTASLTVSGLQAEDEADYYCSSYAGSNNFVFGCGTKVTVL

SEQ ID NO: 314 - protein, 506 aa, Artificial
  M4B / bispecific MOL I2E
QVQLVQSGAEVKKPGASVKVSCKASGYTFTDYHMHWVRQAPGQCLEWMGWIKPISGDANYAQKFQGRVTMTRDTSISTAYMELSRLRSDDTAVYYCARDAYSSSWTLYYYYGMDVWGQGTTVTVSSGGGGSGGGGSGGGGSQSALTQPPSASGSPGQSVTISCTGTSSDVGGYNYVSWYQQHPGKAPKLMIYEVSKRPSGVPDRFSGSKSGNTASLTVSGLQAEDEADYYCSSYAGSNNFVFGCGTKVTVLSGGGGSEVQLVESGGGLVQPGGSLKLSCAASGFTFNKYAINWVRQAPGKGLEWVARIRSKYNNYATYYADAVKDRFTISRDDSKNTVYLQMNNLKTEDTAVYYCARAGNFGSSYISYWAYWGQGTLVTVSSGGGGSGGGGSGGGGSQTVVTQEPSLTVSPGGTVTITCGSSTGAVTSGNYPNWVQKKPGQAPRGLIGGTKFLAPGTPARFSGSLSGGKAALTLSGVQPEDEAEYYCVLWYSNRWVFGSGTKLTVL

SEQ ID NO: 315 - protein, 994 aa, Artificial
  M4B / HLE BITE I2E
QVQLVQSGAEVKKPGASVKVSCKASGYTFTDYHMHWVRQAPGQCLEWMGWIKPISGDANYAQKFQGRVTMTRDTSISTAYMELSRLRSDDTAVYYCARDAYSSSWTLYYYYGMDVWGQGTTVTVSSGGGGSGGGGSGGGGSQSALTQPPSASGSPGQSVTISCTGTSSDVGGYNYVSWYQQHPGKAPKLMIYEVSKRPSGVPDRFSGSKSGNTASLTVSGLQAEDEADYYCSSYAGSNNFVFGCGTKVTVLSGGGGSEVQLVESGGGLVQPGGSLKLSCAASGFTFNKYAINWVRQAPGKGLEWVARIRSKYNNYATYYADAVKDRFTISRDDSKNTVYLQMNNLKTEDTAVYYCARAGNFGSSYISYWAYWGQGTLVTVSSGGGGSGGGGSGGGGSQTVVTQEPSLTVSPGGTVTITCGSSTGAVTSGNYPNWVQKKPGQAPRGLIGGTKFLAPGTPARFSGSLSGGKAALTLSGVQPEDEAEYYCVLWYSNRWVFGSGTKLTVLGGGGDKTHTCPPCPAPELLGGPSVFLFPPKPKDTLMISRTPEVTCVVVDVSHEDPEVKFNWYVDGVEVHNAKTKPCEEQYGSTYRCVSVLTVLHQDWLNGKEYKCKVSNKALPAPIEKTISKAKGQPREPQVYTLPPSREEMTKNQVSLTCLVKGFYPSDIAVEWESNGQPENNYKTTPPVLDSDGSFFLYSKLTVDKSRWQQGNVFSCSVMHEALHNHYTQKSLSLSPGKGGGGSGGGGSGGGGSGGGGSGGGGSGGGGSDKTHTCPPCPAPELLGGPSVFLFPPKPKDTLMISRTPEVTCVVVDVSHEDPEVKFNWYVDGVEVHNAKTKPCEEQYGSTYRCVSVLTVLHQDWLNGKEYKCKVSNKALPAPIEKTISKAKGQPREPQVYTLPPSREEMTKNQVSLTCLVKGFYPSDIAVEWESNGQPENNYKTTPPVLDSDGSFFLYSKLTVDKSRWQQGNVFSCSVMHEALHNHYTQKSLSLSPGK

SEQ ID NO: 316 - protein, 251 aa, Artificial; identical to SEQ ID NO: 313
  M4B / scFv I2C

SEQ ID NO: 317 - protein, 506 aa, Artificial
  M4B / bispecific MOL I2C
QVQLVQSGAEVKKPGASVKVSCKASGYTFTDYHMHWVRQAPGQCLEWMGWIKPISGDANYAQKFQGRVTMTRDTSISTAYMELSRLRSDDTAVYYCARDAYSSSWTLYYYYGMDVWGQGTTVTVSSGGGGSGGGGSGGGGSQSALTQPPSASGSPGQSVTISCTGTSSDVGGYNYVSWYQQHPGKAPKLMIYEVSKRPSGVPDRFSGSKSGNTASLTVSGLQAEDEADYYCSSYAGSNNFVFGCGTKVTVLSGGGGSEVQLVESGGGLVQPGGSLKLSCAASGFTFNKYAMNWVRQAPGKGLEWVARIRSKYNNYATYYADSVKDRFTISRDDSKNTAYLQMNNLKTEDTAVYYCVRHGNFGNSYISYWAYWGQGTLVTVSSGGGGSGGGGSGGGGSQTVVTQEPSLTVSPGGTVTLTCGSSTGAVTSGNYPNWVQQKPGQAPRGLIGGTKFLAPGTPARFSGSLLGGKAALTLSGVQPEDEAEYYCVLWYSNRWVFGGGTKLTVL

SEQ ID NO: 318 - protein, 994 aa, Artificial
  M4B / HLE BITE I2C
QVQLVQSGAEVKKPGASVKVSCKASGYTFTDYHMHWVRQAPGQCLEWMGWIKPISGDANYAQKFQGRVTMTRDTSISTAYMELSRLRSDDTAVYYCARDAYSSSWTLYYYYGMDVWGQGTTVTVSSGGGGSGGGGSGGGGSQSALTQPPSASGSPGQSVTISCTGTSSDVGGYNYVSWYQQHPGKAPKLMIYEVSKRPSGVPDRFSGSKSGNTASLTVSGLQAEDEADYYCSSYAGSNNFVFGCGTKVTVLSGGGGSEVQLVESGGGLVQPGGSLKLSCAASGFTFNKYAMNWVRQAPGKGLEWVARIRSKYNNYATYYADSVKDRFTISRDDSKNTAYLQMNNLKTEDTAVYYCVRHGNFGNSYISYWAYWGQGTLVTVSSGGGGSGGGGSGGGGSQTVVTQEPSLTVSPGGTVTLTCGSSTGAVTSGNYPNWVQQKPGQAPRGLIGGTKFLAPGTPARFSGSLLGGKAALTLSGVQPEDEAEYYCVLWYSNRWVFGGGTKLTVLGGGGDKTHTCPPCPAPELLGGPSVFLFPPKPKDTLMISRTPEVTCVVVDVSHEDPEVKFNWYVDGVEVHNAKTKPCEEQYGSTYRCVSVLTVLHQDWLNGKEYKCKVSNKALPAPIEKTISKAKGQPREPQVYTLPPSREEMTKNQVSLTCLVKGFYPSDIAVEWESNGQPENNYKTTPPVLDSDGSFFLYSKLTVDKSRWQQGNVFSCSVMHEALHNHYTQKSLSLSPGKGGGGSGGGGSGGGGSGGGGSGGGGSGGGGSDKTHTCPPCPAPELLGGPSVFLFPPKPKDTLMISRTPEVTCVVVDVSHEDPEVKFNWYVDGVEVHNAKTKPCEEQYGSTYRCVSVLTVLHQDWLNGKEYKCKVSNKALPAPIEKTISKAKGQPREPQVYTLPPSREEMTKNQVSLTCLVKGFYPSDIAVEWESNGQPENNYKTTPPVLDSDGSFFLYSKLTVDKSRWQQGNVFSCSVMHEALHNHYTQKSLSLSPGK

SEQ ID NO: 319 - protein, 126 aa, Artificial; identical to SEQ ID NO: 305
  VH of B4G

SEQ ID NO: 320 - protein, 110 aa, Artificial
  VL of B4G
QSALTQPPSASGSPGQSVTSYCTGTSSDVGGYNYVSWYQQHPGKAPKLMIYEVSKRPSGVPDRFSGSKSGNTASLTVSGLQAEDEADYYCSSYAGSNNFVFGCGTKVTVL

SEQ ID NO: 321 - protein, 5 aa, Artificial
  CDR-H1 of B4G
DYHMH

SEQ ID NO: 322 - protein, 17 aa, Artificial
  CDR-H2 of B4G
WIKPISGDANYAQKFQG

SEQ ID NO: 323 - protein, 17 aa, Artificial
  CDR-H3 of B4G
DAYSSSWTLYYYYGMDV

SEQ ID NO: 324 - protein, 14 aa, Artificial
  CDR-L1 of B4G
TGTSSDVGGYNYVS

SEQ ID NO: 325 - protein, 7 aa, Artificial
  CDR-L2 of B4G
EVSKRPS

SEQ ID NO: 326 - protein, 10 aa, Artificial
  CDR-L3 of B4G
SSYAGSNNFV

SEQ ID NO: 327 - protein, 251 aa, Artificial
  B4G / scFv I2E
QVQLVQSGAEVKKPGASVKVSCKASGYTFTDYHMHWVRQAPGQCLEWMGWIKPISGDANYAQKFQGRVTMTRDTSISTAYMELSRLRSDDTAVYYCARDAYSSSWTLYYYYGMDVWGQGTTVTVSSGGGGSGGGGSGGGGSQSALTQPPSASGSPGQSVTSYCTGTSSDVGGYNYVSWYQQHPGKAPKLMIYEVSKRPSGVPDRFSGSKSGNTASLTVSGLQAEDEADYYCSSYAGSNNFVFGCGTKVTVL

SEQ ID NO: 328 - protein, 506 aa, Artificial
  B4G / bispecific MOL I2E
QVQLVQSGAEVKKPGASVKVSCKASGYTFTDYHMHWVRQAPGQCLEWMGWIKPISGDANYAQKFQGRVTMTRDTSISTAYMELSRLRSDDTAVYYCARDAYSSSWTLYYYYGMDVWGQGTTVTVSSGGGGSGGGGSGGGGSQSALTQPPSASGSPGQSVTSYCTGTSSDVGGYNYVSWYQQHPGKAPKLMIYEVSKRPSGVPDRFSGSKSGNTASLTVSGLQAEDEADYYCSSYAGSNNFVFGCGTKVTVLSGGGGSEVQLVESGGGLVQPGGSLKLSCAASGFTFNKYAINWVRQAPGKGLEWVARIRSKYNNYATYYADAVKDRFTISRDDSKNTVYLQMNNLKTEDTAVYYCARAGNFGSSYISYWAYWGQGTLVTVSSGGGGSGGGGSGGGGSQTVVTQEPSLTVSPGGTVTITCGSSTGAVTSGNYPNWVQKKPGQAPRGLIGGTKFLAPGTPARFSGSLSGGKAALTLSGVQPEDEAEYYCVLWYSNRWVFGSGTKLTVL

SEQ ID NO: 329 - protein, 994 aa, Artificial
  B4G / HLE-BITE I2E
QVQLVQSGAEVKKPGASVKVSCKASGYTFTDYHMHWVRQAPGQCLEWMGWIKPISGDANYAQKFQGRVTMTRDTSISTAYMELSRLRSDDTAVYYCARDAYSSSWTLYYYYGMDVWGQGTTVTVSSGGGGSGGGGSGGGGSQSALTQPPSASGSPGQSVTSYCTGTSSDVGGYNYVSWYQQHPGKAPKLMIYEVSKRPSGVPDRFSGSKSGNTASLTVSGLQAEDEADYYCSSYAGSNNFVFGCGTKVTVLSGGGGSEVQLVESGGGLVQPGGSLKLSCAASGFTFNKYAINWVRQAPGKGLEWVARIRSKYNNYATYYADAVKDRFTISRDDSKNTVYLQMNNLKTEDTAVYYCARAGNFGSSYISYWAYWGQGTLVTVSSGGGGSGGGGSGGGGSQTVVTQEPSLTVSPGGTVTITCGSSTGAVTSGNYPNWVQKKPGQAPRGLIGGTKFLAPGTPARFSGSLSGGKAALTLSGVQPEDEAEYYCVLWYSNRWVFGSGTKLTVLGGGGDKTHTCPPCPAPELLGGPSVFLFPPKPKDTLMISRTPEVTCVVVDVSHEDPEVKFNWYVDGVEVHNAKTKPCEEQYGSTYRCVSVLTVLHQDWLNGKEYKCKVSNKALPAPIEKTISKAKGQPREPQVYTLPPSREEMTKNQVSLTCLVKGFYPSDIAVEWESNGQPENNYKTTPPVLDSDGSFFLYSKLTVDKSRWQQGNVFSCSVMHEALHNHYTQKSLSLSPGKGGGGSGGGGSGGGGSGGGGSGGGGSGGGGSDKTHTCPPCPAPELLGGPSVFLFPPKPKDTLMISRTPEVTCVVVDVSHEDPEVKFNWYVDGVEVHNAKTKPCEEQYGSTYRCVSVLTVLHQDWLNGKEYKCKVSNKALPAPIEKTISKAKGQPREPQVYTLPPSREEMTKNQVSLTCLVKGFYPSDIAVEWESNGQPENNYKTTPPVLDSDGSFFLYSKLTVDKSRWQQGNVFSCSVMHEALHNHYTQKSLSLSPGK

SEQ ID NO: 330 - protein, 251 aa, Artificial; identical to SEQ ID NO: 327
  B4G / scFv I2C

SEQ ID NO: 331 - protein, 506 aa, Artificial
  B4G / bispecific MOL I2C
QVQLVQSGAEVKKPGASVKVSCKASGYTFTDYHMHWVRQAPGQCLEWMGWIKPISGDANYAQKFQGRVTMTRDTSISTAYMELSRLRSDDTAVYYCARDAYSSSWTLYYYYGMDVWGQGTTVTVSSGGGGSGGGGSGGGGSQSALTQPPSASGSPGQSVTSYCTGTSSDVGGYNYVSWYQQHPGKAPKLMIYEVSKRPSGVPDRFSGSKSGNTASLTVSGLQAEDEADYYCSSYAGSNNFVFGCGTKVTVLSGGGGSEVQLVESGGGLVQPGGSLKLSCAASGFTFNKYAMNWVRQAPGKGLEWVARIRSKYNNYATYYADSVKDRFTISRDDSKNTAYLQMNNLKTEDTAVYYCVRHGNFGNSYISYWAYWGQGTLVTVSSGGGGSGGGGSGGGGSQTVVTQEPSLTVSPGGTVTLTCGSSTGAVTSGNYPNWVQQKPGQAPRGLIGGTKFLAPGTPARFSGSLLGGKAALTLSGVQPEDEAEYYCVLWYSNRWVFGGGTKLTVL

SEQ ID NO: 332 - protein, 994 aa, Artificial
  B4G / HLE BITE I2C
QVQLVQSGAEVKKPGASVKVSCKASGYTFTDYHMHWVRQAPGQCLEWMGWIKPISGDANYAQKFQGRVTMTRDTSISTAYMELSRLRSDDTAVYYCARDAYSSSWTLYYYYGMDVWGQGTTVTVSSGGGGSGGGGSGGGGSQSALTQPPSASGSPGQSVTSYCTGTSSDVGGYNYVSWYQQHPGKAPKLMIYEVSKRPSGVPDRFSGSKSGNTASLTVSGLQAEDEADYYCSSYAGSNNFVFGCGTKVTVLSGGGGSEVQLVESGGGLVQPGGSLKLSCAASGFTFNKYAMNWVRQAPGKGLEWVARIRSKYNNYATYYADSVKDRFTISRDDSKNTAYLQMNNLKTEDTAVYYCVRHGNFGNSYISYWAYWGQGTLVTVSSGGGGSGGGGSGGGGSQTVVTQEPSLTVSPGGTVTLTCGSSTGAVTSGNYPNWVQQKPGQAPRGLIGGTKFLAPGTPARFSGSLLGGKAALTLSGVQPEDEAEYYCVLWYSNRWVFGGGTKLTVLGGGGDKTHTCPPCPAPELLGGPSVFLFPPKPKDTLMISRTPEVTCVVVDVSHEDPEVKFNWYVDGVEVHNAKTKPCEEQYGSTYRCVSVLTVLHQDWLNGKEYKCKVSNKALPAPIEKTISKAKGQPREPQVYTLPPSREEMTKNQVSLTCLVKGFYPSDIAVEWESNGQPENNYKTTPPVLDSDGSFFLYSKLTVDKSRWQQGNVFSCSVMHEALHNHYTQKSLSLSPGKGGGGSGGGGSGGGGSGGGGSGGGGSGGGGSDKTHTCPPCPAPELLGGPSVFLFPPKPKDTLMISRTPEVTCVVVDVSHEDPEVKFNWYVDGVEVHNAKTKPCEEQYGSTYRCVSVLTVLHQDWLNGKEYKCKVSNKALPAPIEKTISKAKGQPREPQVYTLPPSREEMTKNQVSLTCLVKGFYPSDIAVEWESNGQPENNYKTTPPVLDSDGSFFLYSKLTVDKSRWQQGNVFSCSVMHEALHNHYTQKSLSLSPGK

SEQ ID NO: 333 - protein, 126 aa, Artificial
  VH of U8B
QVQLVQSGAEVKKPGASVKVSCKASGYTFTDYHMHWVRQAPGQCLEWMGWIKPISGDANYAQKFQGRVTMTRDTSISTAYMELSRLRSDDTAVYYCARDYYSSSWTLYYYYGMDVWGQGTTVTVSS

SEQ ID NO: 334 - protein, 110 aa, Artificial; identical to SEQ ID NO: 320
  VL of U8B

SEQ ID NO: 335 - protein, 5 aa, Artificial
  CDR-H1 of U8B
DYHMH

SEQ ID NO: 336 - protein, 17 aa, Artificial
  CDR-H2 of U8B
WIKPISGDANYAQKFQG

SEQ ID NO: 337 - protein, 17 aa, Artificial
  CDR-H3 of U8B
DYYSSSWTLYYYYGMDV

SEQ ID NO: 338 - protein, 14 aa, Artificial
  CDR-L1 of U8B
TGTSSDVGGYNYVS

SEQ ID NO: 339 - protein, 7 aa, Artificial
  CDR-L2 of U8B
EVSKRPS

SEQ ID NO: 340 - protein, 10 aa, Artificial
  CDR-L3 of U8B
SSYAGSNNFV

SEQ ID NO: 341 - protein, 251 aa, Artificial
  U8B 7 scFv I2E
QVQLVQSGAEVKKPGASVKVSCKASGYTFTDYHMHWVRQAPGQCLEWMGWIKPISGDANYAQKFQGRVTMTRDTSISTAYMELSRLRSDDTAVYYCARDYYSSSWTLYYYYGMDVWGQGTTVTVSSGGGGSGGGGSGGGGSQSALTQPPSASGSPGQSVTSYCTGTSSDVGGYNYVSWYQQHPGKAPKLMIYEVSKRPSGVPDRFSGSKSGNTASLTVSGLQAEDEADYYCSSYAGSNNFVFGCGTKVTVL

SEQ ID NO: 342 - protein, 506 aa, Artificial
  U8B / bispecific MOL I2E
QVQLVQSGAEVKKPGASVKVSCKASGYTFTDYHMHWVRQAPGQCLEWMGWIKPISGDANYAQKFQGRVTMTRDTSISTAYMELSRLRSDDTAVYYCARDYYSSSWTLYYYYGMDVWGQGTTVTVSSGGGGSGGGGSGGGGSQSALTQPPSASGSPGQSVTSYCTGTSSDVGGYNYVSWYQQHPGKAPKLMIYEVSKRPSGVPDRFSGSKSGNTASLTVSGLQAEDEADYYCSSYAGSNNFVFGCGTKVTVLSGGGGSEVQLVESGGGLVQPGGSLKLSCAASGFTFNKYAINWVRQAPGKGLEWVARIRSKYNNYATYYADAVKDRFTISRDDSKNTVYLQMNNLKTEDTAVYYCARAGNFGSSYISYWAYWGQGTLVTVSSGGGGSGGGGSGGGGSQTVVTQEPSLTVSPGGTVTITCGSSTGAVTSGNYPNWVQKKPGQAPRGLIGGTKFLAPGTPARFSGSLSGGKAALTLSGVQPEDEAEYYCVLWYSNRWVFGSGTKLTVL

SEQ ID NO: 343 - protein, 994 aa, Artificial
  U8B / HLE-BITE I2E
QVQLVQSGAEVKKPGASVKVSCKASGYTFTDYHMHWVRQAPGQCLEWMGWIKPISGDANYAQKFQGRVTMTRDTSISTAYMELSRLRSDDTAVYYCARDYYSSSWTLYYYYGMDVWGQGTTVTVSSGGGGSGGGGSGGGGSQSALTQPPSASGSPGQSVTSYCTGTSSDVGGYNYVSWYQQHPGKAPKLMIYEVSKRPSGVPDRFSGSKSGNTASLTVSGLQAEDEADYYCSSYAGSNNFVFGCGTKVTVLSGGGGSEVQLVESGGGLVQPGGSLKLSCAASGFTFNKYAINWVRQAPGKGLEWVARIRSKYNNYATYYADAVKDRFTISRDDSKNTVYLQMNNLKTEDTAVYYCARAGNFGSSYISYWAYWGQGTLVTVSSGGGGSGGGGSGGGGSQTVVTQEPSLTVSPGGTVTITCGSSTGAVTSGNYPNWVQKKPGQAPRGLIGGTKFLAPGTPARFSGSLSGGKAALTLSGVQPEDEAEYYCVLWYSNRWVFGSGTKLTVLGGGGDKTHTCPPCPAPELLGGPSVFLFPPKPKDTLMISRTPEVTCVVVDVSHEDPEVKFNWYVDGVEVHNAKTKPCEEQYGSTYRCVSVLTVLHQDWLNGKEYKCKVSNKALPAPIEKTISKAKGQPREPQVYTLPPSREEMTKNQVSLTCLVKGFYPSDIAVEWESNGQPENNYKTTPPVLDSDGSFFLYSKLTVDKSRWQQGNVFSCSVMHEALHNHYTQKSLSLSPGKGGGGSGGGGSGGGGSGGGGSGGGGSGGGGSDKTHTCPPCPAPELLGGPSVFLFPPKPKDTLMISRTPEVTCVVVDVSHEDPEVKFNWYVDGVEVHNAKTKPCEEQYGSTYRCVSVLTVLHQDWLNGKEYKCKVSNKALPAPIEKTISKAKGQPREPQVYTLPPSREEMTKNQVSLTCLVKGFYPSDIAVEWESNGQPENNYKTTPPVLDSDGSFFLYSKLTVDKSRWQQGNVFSCSVMHEALHNHYTQKSLSLSPGK

SEQ ID NO: 344 - protein, 251 aa, Artificial; identical to SEQ ID NO: 341
  U8B / scFv I2C

SEQ ID NO: 345 - protein, 506 aa, Artificial
  U8B / bispecific MOL I2C
QVQLVQSGAEVKKPGASVKVSCKASGYTFTDYHMHWVRQAPGQCLEWMGWIKPISGDANYAQKFQGRVTMTRDTSISTAYMELSRLRSDDTAVYYCARDYYSSSWTLYYYYGMDVWGQGTTVTVSSGGGGSGGGGSGGGGSQSALTQPPSASGSPGQSVTSYCTGTSSDVGGYNYVSWYQQHPGKAPKLMIYEVSKRPSGVPDRFSGSKSGNTASLTVSGLQAEDEADYYCSSYAGSNNFVFGCGTKVTVLSGGGGSEVQLVESGGGLVQPGGSLKLSCAASGFTFNKYAMNWVRQAPGKGLEWVARIRSKYNNYATYYADSVKDRFTISRDDSKNTAYLQMNNLKTEDTAVYYCVRHGNFGNSYISYWAYWGQGTLVTVSSGGGGSGGGGSGGGGSQTVVTQEPSLTVSPGGTVTLTCGSSTGAVTSGNYPNWVQQKPGQAPRGLIGGTKFLAPGTPARFSGSLLGGKAALTLSGVQPEDEAEYYCVLWYSNRWVFGGGTKLTVL

SEQ ID NO: 346 - protein, 994 aa, Artificial
  U8B / HLE BITE I2C
QVQLVQSGAEVKKPGASVKVSCKASGYTFTDYHMHWVRQAPGQCLEWMGWIKPISGDANYAQKFQGRVTMTRDTSISTAYMELSRLRSDDTAVYYCARDYYSSSWTLYYYYGMDVWGQGTTVTVSSGGGGSGGGGSGGGGSQSALTQPPSASGSPGQSVTSYCTGTSSDVGGYNYVSWYQQHPGKAPKLMIYEVSKRPSGVPDRFSGSKSGNTASLTVSGLQAEDEADYYCSSYAGSNNFVFGCGTKVTVLSGGGGSEVQLVESGGGLVQPGGSLKLSCAASGFTFNKYAMNWVRQAPGKGLEWVARIRSKYNNYATYYADSVKDRFTISRDDSKNTAYLQMNNLKTEDTAVYYCVRHGNFGNSYISYWAYWGQGTLVTVSSGGGGSGGGGSGGGGSQTVVTQEPSLTVSPGGTVTLTCGSSTGAVTSGNYPNWVQQKPGQAPRGLIGGTKFLAPGTPARFSGSLLGGKAALTLSGVQPEDEAEYYCVLWYSNRWVFGGGTKLTVLGGGGDKTHTCPPCPAPELLGGPSVFLFPPKPKDTLMISRTPEVTCVVVDVSHEDPEVKFNWYVDGVEVHNAKTKPCEEQYGSTYRCVSVLTVLHQDWLNGKEYKCKVSNKALPAPIEKTISKAKGQPREPQVYTLPPSREEMTKNQVSLTCLVKGFYPSDIAVEWESNGQPENNYKTTPPVLDSDGSFFLYSKLTVDKSRWQQGNVFSCSVMHEALHNHYTQKSLSLSPGKGGGGSGGGGSGGGGSGGGGSGGGGSGGGGSDKTHTCPPCPAPELLGGPSVFLFPPKPKDTLMISRTPEVTCVVVDVSHEDPEVKFNWYVDGVEVHNAKTKPCEEQYGSTYRCVSVLTVLHQDWLNGKEYKCKVSNKALPAPIEKTISKAKGQPREPQVYTLPPSREEMTKNQVSLTCLVKGFYPSDIAVEWESNGQPENNYKTTPPVLDSDGSFFLYSKLTVDKSRWQQGNVFSCSVMHEALHNHYTQKSLSLSPGK

SEQ ID NO: 347 - protein, 126 aa, Artificial
  VH of Y8G
QVQLVQSGAEVKKPGASVKVSCKASGYTFTDYHMHWVRQAPGQCLEWMGWIKPISGDANYAQKFQGRVTMTRDTSISTAYMELSRLRSDDTAVYYCARDGYSSSWTLYYYYGMDVWGQGTTVTVSS

SEQ ID NO: 348 - protein, 110 aa, Artificial; identical to SEQ ID NO: 320
  VL of Y8G

SEQ ID NO: 349 - protein, 5 aa, Artificial
  CDR-H1 of Y8G
DYHMH

SEQ ID NO: 350 - protein, 17 aa, Artificial
  CDR-H2 of Y8G
WIKPISGDANYAQKFQG

SEQ ID NO: 351 - protein, 17 aa, Artificial
  CDR-H3 of Y8G
DGYSSSWTLYYYYGMDV

SEQ ID NO: 352 - protein, 14 aa, Artificial
  CDR-L1 of Y8G
TGTSSDVGGYNYVS

SEQ ID NO: 353 - protein, 7 aa, Artificial
  CDR-L2 of Y8G
EVSKRPS

SEQ ID NO: 354 - protein, 10 aa, Artificial
  CDR-L3 of Y8G
SSYAGSNNFV

SEQ ID NO: 355 - protein, 251 aa, Artificial
  Y8G / scFv I2E
QVQLVQSGAEVKKPGASVKVSCKASGYTFTDYHMHWVRQAPGQCLEWMGWIKPISGDANYAQKFQGRVTMTRDTSISTAYMELSRLRSDDTAVYYCARDGYSSSWTLYYYYGMDVWGQGTTVTVSSGGGGSGGGGSGGGGSQSALTQPPSASGSPGQSVTSYCTGTSSDVGGYNYVSWYQQHPGKAPKLMIYEVSKRPSGVPDRFSGSKSGNTASLTVSGLQAEDEADYYCSSYAGSNNFVFGCGTKVTVL

SEQ ID NO: 356 - protein, 506 aa, Artificial
  Y8G / bispecific MOL I2E
QVQLVQSGAEVKKPGASVKVSCKASGYTFTDYHMHWVRQAPGQCLEWMGWIKPISGDANYAQKFQGRVTMTRDTSISTAYMELSRLRSDDTAVYYCARDGYSSSWTLYYYYGMDVWGQGTTVTVSSGGGGSGGGGSGGGGSQSALTQPPSASGSPGQSVTSYCTGTSSDVGGYNYVSWYQQHPGKAPKLMIYEVSKRPSGVPDRFSGSKSGNTASLTVSGLQAEDEADYYCSSYAGSNNFVFGCGTKVTVLSGGGGSEVQLVESGGGLVQPGGSLKLSCAASGFTFNKYAINWVRQAPGKGLEWVARIRSKYNNYATYYADAVKDRFTISRDDSKNTVYLQMNNLKTEDTAVYYCARAGNFGSSYISYWAYWGQGTLVTVSSGGGGSGGGGSGGGGSQTVVTQEPSLTVSPGGTVTITCGSSTGAVTSGNYPNWVQKKPGQAPRGLIGGTKFLAPGTPARFSGSLSGGKAALTLSGVQPEDEAEYYCVLWYSNRWVFGSGTKLTVL

SEQ ID NO: 357 - protein, 994 aa, Artificial
  Y8G / HLE-BITE I2E
QVQLVQSGAEVKKPGASVKVSCKASGYTFTDYHMHWVRQAPGQCLEWMGWIKPISGDANYAQKFQGRVTMTRDTSISTAYMELSRLRSDDTAVYYCARDGYSSSWTLYYYYGMDVWGQGTTVTVSSGGGGSGGGGSGGGGSQSALTQPPSASGSPGQSVTSYCTGTSSDVGGYNYVSWYQQHPGKAPKLMIYEVSKRPSGVPDRFSGSKSGNTASLTVSGLQAEDEADYYCSSYAGSNNFVFGCGTKVTVLSGGGGSEVQLVESGGGLVQPGGSLKLSCAASGFTFNKYAINWVRQAPGKGLEWVARIRSKYNNYATYYADAVKDRFTISRDDSKNTVYLQMNNLKTEDTAVYYCARAGNFGSSYISYWAYWGQGTLVTVSSGGGGSGGGGSGGGGSQTVVTQEPSLTVSPGGTVTITCGSSTGAVTSGNYPNWVQKKPGQAPRGLIGGTKFLAPGTPARFSGSLSGGKAALTLSGVQPEDEAEYYCVLWYSNRWVFGSGTKLTVLGGGGDKTHTCPPCPAPELLGGPSVFLFPPKPKDTLMISRTPEVTCVVVDVSHEDPEVKFNWYVDGVEVHNAKTKPCEEQYGSTYRCVSVLTVLHQDWLNGKEYKCKVSNKALPAPIEKTISKAKGQPREPQVYTLPPSREEMTKNQVSLTCLVKGFYPSDIAVEWESNGQPENNYKTTPPVLDSDGSFFLYSKLTVDKSRWQQGNVFSCSVMHEALHNHYTQKSLSLSPGKGGGGSGGGGSGGGGSGGGGSGGGGSGGGGSDKTHTCPPCPAPELLGGPSVFLFPPKPKDTLMISRTPEVTCVVVDVSHEDPEVKFNWYVDGVEVHNAKTKPCEEQYGSTYRCVSVLTVLHQDWLNGKEYKCKVSNKALPAPIEKTISKAKGQPREPQVYTLPPSREEMTKNQVSLTCLVKGFYPSDIAVEWESNGQPENNYKTTPPVLDSDGSFFLYSKLTVDKSRWQQGNVFSCSVMHEALHNHYTQKSLSLSPGK

SEQ ID NO: 358 - protein, 251 aa, Artificial; identical to SEQ ID NO: 355
  Y8G / scFv I2C

SEQ ID NO: 359 - protein, 506 aa, Artificial
  Y8G / bispecific MOL I2C
QVQLVQSGAEVKKPGASVKVSCKASGYTFTDYHMHWVRQAPGQCLEWMGWIKPISGDANYAQKFQGRVTMTRDTSISTAYMELSRLRSDDTAVYYCARDGYSSSWTLYYYYGMDVWGQGTTVTVSSGGGGSGGGGSGGGGSQSALTQPPSASGSPGQSVTSYCTGTSSDVGGYNYVSWYQQHPGKAPKLMIYEVSKRPSGVPDRFSGSKSGNTASLTVSGLQAEDEADYYCSSYAGSNNFVFGCGTKVTVLSGGGGSEVQLVESGGGLVQPGGSLKLSCAASGFTFNKYAMNWVRQAPGKGLEWVARIRSKYNNYATYYADSVKDRFTISRDDSKNTAYLQMNNLKTEDTAVYYCVRHGNFGNSYISYWAYWGQGTLVTVSSGGGGSGGGGSGGGGSQTVVTQEPSLTVSPGGTVTLTCGSSTGAVTSGNYPNWVQQKPGQAPRGLIGGTKFLAPGTPARFSGSLLGGKAALTLSGVQPEDEAEYYCVLWYSNRWVFGGGTKLTVL

SEQ ID NO: 360 - protein, 994 aa, Artificial
  Y8G / HLE BITE I2C
QVQLVQSGAEVKKPGASVKVSCKASGYTFTDYHMHWVRQAPGQCLEWMGWIKPISGDANYAQKFQGRVTMTRDTSISTAYMELSRLRSDDTAVYYCARDGYSSSWTLYYYYGMDVWGQGTTVTVSSGGGGSGGGGSGGGGSQSALTQPPSASGSPGQSVTSYCTGTSSDVGGYNYVSWYQQHPGKAPKLMIYEVSKRPSGVPDRFSGSKSGNTASLTVSGLQAEDEADYYCSSYAGSNNFVFGCGTKVTVLSGGGGSEVQLVESGGGLVQPGGSLKLSCAASGFTFNKYAMNWVRQAPGKGLEWVARIRSKYNNYATYYADSVKDRFTISRDDSKNTAYLQMNNLKTEDTAVYYCVRHGNFGNSYISYWAYWGQGTLVTVSSGGGGSGGGGSGGGGSQTVVTQEPSLTVSPGGTVTLTCGSSTGAVTSGNYPNWVQQKPGQAPRGLIGGTKFLAPGTPARFSGSLLGGKAALTLSGVQPEDEAEYYCVLWYSNRWVFGGGTKLTVLGGGGDKTHTCPPCPAPELLGGPSVFLFPPKPKDTLMISRTPEVTCVVVDVSHEDPEVKFNWYVDGVEVHNAKTKPCEEQYGSTYRCVSVLTVLHQDWLNGKEYKCKVSNKALPAPIEKTISKAKGQPREPQVYTLPPSREEMTKNQVSLTCLVKGFYPSDIAVEWESNGQPENNYKTTPPVLDSDGSFFLYSKLTVDKSRWQQGNVFSCSVMHEALHNHYTQKSLSLSPGKGGGGSGGGGSGGGGSGGGGSGGGGSGGGGSDKTHTCPPCPAPELLGGPSVFLFPPKPKDTLMISRTPEVTCVVVDVSHEDPEVKFNWYVDGVEVHNAKTKPCEEQYGSTYRCVSVLTVLHQDWLNGKEYKCKVSNKALPAPIEKTISKAKGQPREPQVYTLPPSREEMTKNQVSLTCLVKGFYPSDIAVEWESNGQPENNYKTTPPVLDSDGSFFLYSKLTVDKSRWQQGNVFSCSVMHEALHNHYTQKSLSLSPGK

SEQ ID NO: 361 - protein, 126 aa, Artificial; identical to SEQ ID NO: 333
  VH of G8B

SEQ ID NO: 362 - protein, 110 aa, Artificial
  VL of G8B
QSALTQPPSASGSPGQSVTIYCTGTSSDVGGYNYVSWYQQHPGKAPKLMIYEVSKRPSGVPDRFSGSKSGNTASLTVSGLQAEDEADYYCSSYAGSNNFVFGCGTKVTVL

SEQ ID NO: 363 - protein, 5 aa, Artificial
  CDR-H1 of G8B
DYHMH

SEQ ID NO: 364 - protein, 17 aa, Artificial
  CDR-H3 of G8B
WIKPISGDANYAQKFQG

SEQ ID NO: 365 - protein, 17 aa, Artificial
  CDR-H3 of G8B
DYYSSSWTLYYYYGMDV

SEQ ID NO: 366 - protein, 14 aa, Artificial
  CDR-L1 of G8B
TGTSSDVGGYNYVS

SEQ ID NO: 367 - protein, 7 aa, Artificial
  CDR-L2 of G8B
EVSKRPS

SEQ ID NO: 368 - protein, 10 aa, Artificial
  CDR-L3 of G8B
SSYAGSNNFV

SEQ ID NO: 369 - protein, 251 aa, Artificial
  G8B / scFv I2E
QVQLVQSGAEVKKPGASVKVSCKASGYTFTDYHMHWVRQAPGQCLEWMGWIKPISGDANYAQKFQGRVTMTRDTSISTAYMELSRLRSDDTAVYYCARDYYSSSWTLYYYYGMDVWGQGTTVTVSSGGGGSGGGGSGGGGSQSALTQPPSASGSPGQSVTIYCTGTSSDVGGYNYVSWYQQHPGKAPKLMIYEVSKRPSGVPDRFSGSKSGNTASLTVSGLQAEDEADYYCSSYAGSNNFVFGCGTKVTVL

SEQ ID NO: 370 - protein, 506 aa, Artificial
  G8B / bispecific MOL I2E
QVQLVQSGAEVKKPGASVKVSCKASGYTFTDYHMHWVRQAPGQCLEWMGWIKPISGDANYAQKFQGRVTMTRDTSISTAYMELSRLRSDDTAVYYCARDYYSSSWTLYYYYGMDVWGQGTTVTVSSGGGGSGGGGSGGGGSQSALTQPPSASGSPGQSVTIYCTGTSSDVGGYNYVSWYQQHPGKAPKLMIYEVSKRPSGVPDRFSGSKSGNTASLTVSGLQAEDEADYYCSSYAGSNNFVFGCGTKVTVLSGGGGSEVQLVESGGGLVQPGGSLKLSCAASGFTFNKYAINWVRQAPGKGLEWVARIRSKYNNYATYYADAVKDRFTISRDDSKNTVYLQMNNLKTEDTAVYYCARAGNFGSSYISYWAYWGQGTLVTVSSGGGGSGGGGSGGGGSQTVVTQEPSLTVSPGGTVTITCGSSTGAVTSGNYPNWVQKKPGQAPRGLIGGTKFLAPGTPARFSGSLSGGKAALTLSGVQPEDEAEYYCVLWYSNRWVFGSGTKLTVL

SEQ ID NO: 371 - protein, 994 aa, Artificial
  G8B / HLE BITE I2E
QVQLVQSGAEVKKPGASVKVSCKASGYTFTDYHMHWVRQAPGQCLEWMGWIKPISGDANYAQKFQGRVTMTRDTSISTAYMELSRLRSDDTAVYYCARDYYSSSWTLYYYYGMDVWGQGTTVTVSSGGGGSGGGGSGGGGSQSALTQPPSASGSPGQSVTIYCTGTSSDVGGYNYVSWYQQHPGKAPKLMIYEVSKRPSGVPDRFSGSKSGNTASLTVSGLQAEDEADYYCSSYAGSNNFVFGCGTKVTVLSGGGGSEVQLVESGGGLVQPGGSLKLSCAASGFTFNKYAINWVRQAPGKGLEWVARIRSKYNNYATYYADAVKDRFTISRDDSKNTVYLQMNNLKTEDTAVYYCARAGNFGSSYISYWAYWGQGTLVTVSSGGGGSGGGGSGGGGSQTVVTQEPSLTVSPGGTVTITCGSSTGAVTSGNYPNWVQKKPGQAPRGLIGGTKFLAPGTPARFSGSLSGGKAALTLSGVQPEDEAEYYCVLWYSNRWVFGSGTKLTVLGGGGDKTHTCPPCPAPELLGGPSVFLFPPKPKDTLMISRTPEVTCVVVDVSHEDPEVKFNWYVDGVEVHNAKTKPCEEQYGSTYRCVSVLTVLHQDWLNGKEYKCKVSNKALPAPIEKTISKAKGQPREPQVYTLPPSREEMTKNQVSLTCLVKGFYPSDIAVEWESNGQPENNYKTTPPVLDSDGSFFLYSKLTVDKSRWQQGNVFSCSVMHEALHNHYTQKSLSLSPGKGGGGSGGGGSGGGGSGGGGSGGGGSGGGGSDKTHTCPPCPAPELLGGPSVFLFPPKPKDTLMISRTPEVTCVVVDVSHEDPEVKFNWYVDGVEVHNAKTKPCEEQYGSTYRCVSVLTVLHQDWLNGKEYKCKVSNKALPAPIEKTISKAKGQPREPQVYTLPPSREEMTKNQVSLTCLVKGFYPSDIAVEWESNGQPENNYKTTPPVLDSDGSFFLYSKLTVDKSRWQQGNVFSCSVMHEALHNHYTQKSLSLSPGK

SEQ ID NO: 372 - protein, 251 aa, Artificial; identical to SEQ ID NO: 369
  G8B / scFv I2C

SEQ ID NO: 373 - protein, 506 aa, Artificial
  G8B / bispecific MOL I2C
QVQLVQSGAEVKKPGASVKVSCKASGYTFTDYHMHWVRQAPGQCLEWMGWIKPISGDANYAQKFQGRVTMTRDTSISTAYMELSRLRSDDTAVYYCARDYYSSSWTLYYYYGMDVWGQGTTVTVSSGGGGSGGGGSGGGGSQSALTQPPSASGSPGQSVTIYCTGTSSDVGGYNYVSWYQQHPGKAPKLMIYEVSKRPSGVPDRFSGSKSGNTASLTVSGLQAEDEADYYCSSYAGSNNFVFGCGTKVTVLSGGGGSEVQLVESGGGLVQPGGSLKLSCAASGFTFNKYAMNWVRQAPGKGLEWVARIRSKYNNYATYYADSVKDRFTISRDDSKNTAYLQMNNLKTEDTAVYYCVRHGNFGNSYISYWAYWGQGTLVTVSSGGGGSGGGGSGGGGSQTVVTQEPSLTVSPGGTVTLTCGSSTGAVTSGNYPNWVQQKPGQAPRGLIGGTKFLAPGTPARFSGSLLGGKAALTLSGVQPEDEAEYYCVLWYSNRWVFGGGTKLTVL

SEQ ID NO: 374 - protein, 994 aa, Artificial
  G8B / HLE BITE I2C
QVQLVQSGAEVKKPGASVKVSCKASGYTFTDYHMHWVRQAPGQCLEWMGWIKPISGDANYAQKFQGRVTMTRDTSISTAYMELSRLRSDDTAVYYCARDYYSSSWTLYYYYGMDVWGQGTTVTVSSGGGGSGGGGSGGGGSQSALTQPPSASGSPGQSVTIYCTGTSSDVGGYNYVSWYQQHPGKAPKLMIYEVSKRPSGVPDRFSGSKSGNTASLTVSGLQAEDEADYYCSSYAGSNNFVFGCGTKVTVLSGGGGSEVQLVESGGGLVQPGGSLKLSCAASGFTFNKYAMNWVRQAPGKGLEWVARIRSKYNNYATYYADSVKDRFTISRDDSKNTAYLQMNNLKTEDTAVYYCVRHGNFGNSYISYWAYWGQGTLVTVSSGGGGSGGGGSGGGGSQTVVTQEPSLTVSPGGTVTLTCGSSTGAVTSGNYPNWVQQKPGQAPRGLIGGTKFLAPGTPARFSGSLLGGKAALTLSGVQPEDEAEYYCVLWYSNRWVFGGGTKLTVLGGGGDKTHTCPPCPAPELLGGPSVFLFPPKPKDTLMISRTPEVTCVVVDVSHEDPEVKFNWYVDGVEVHNAKTKPCEEQYGSTYRCVSVLTVLHQDWLNGKEYKCKVSNKALPAPIEKTISKAKGQPREPQVYTLPPSREEMTKNQVSLTCLVKGFYPSDIAVEWESNGQPENNYKTTPPVLDSDGSFFLYSKLTVDKSRWQQGNVFSCSVMHEALHNHYTQKSLSLSPGKGGGGSGGGGSGGGGSGGGGSGGGGSGGGGSDKTHTCPPCPAPELLGGPSVFLFPPKPKDTLMISRTPEVTCVVVDVSHEDPEVKFNWYVDGVEVHNAKTKPCEEQYGSTYRCVSVLTVLHQDWLNGKEYKCKVSNKALPAPIEKTISKAKGQPREPQVYTLPPSREEMTKNQVSLTCLVKGFYPSDIAVEWESNGQPENNYKTTPPVLDSDGSFFLYSKLTVDKSRWQQGNVFSCSVMHEALHNHYTQKSLSLSPGK

SEQ ID NO: 375 - protein, 126 aa, Artificial
  VH of W9B
QVQLVQSGAEVKKPGASVKVSCKASGYTFTDYHMHWVRQAPGQCLEWMGWIKPISGDTNYAQKFQGRVTMTRDTSISTAYMELSRLRSDDTAVYYCARDGYSSSWTLYYYYGMDVWGQGTTVTVSS

SEQ ID NO: 376 - protein, 110 aa, Artificial; identical to SEQ ID NO: 320
  VL of W9B

SEQ ID NO: 377 - protein, 5 aa, Artificial
  CDR-H1 of W9B
DYHMH

SEQ ID NO: 378 - protein, 17 aa, Artificial
  CDR-H2 of W9B
WIKPISGDTNYAQKFQG

SEQ ID NO: 379 - protein, 17 aa, Artificial
  CDR-H3 of W9B
DGYSSSWTLYYYYGMDV

SEQ ID NO: 380 - protein, 14 aa, Artificial
  CDR-L1 of W9B
TGTSSDVGGYNYVS

SEQ ID NO: 381 - protein, 7 aa, Artificial
  CDR-L2 of W9B
EVSKRPS

SEQ ID NO: 382 - protein, 10 aa, Artificial
  CDR-L3 of W9B
SSYAGSNNFV

SEQ ID NO: 383 - protein, 251 aa, Artificial
  W9B / scFv I2E
QVQLVQSGAEVKKPGASVKVSCKASGYTFTDYHMHWVRQAPGQCLEWMGWIKPISGDTNYAQKFQGRVTMTRDTSISTAYMELSRLRSDDTAVYYCARDGYSSSWTLYYYYGMDVWGQGTTVTVSSGGGGSGGGGSGGGGSQSALTQPPSASGSPGQSVTSYCTGTSSDVGGYNYVSWYQQHPGKAPKLMIYEVSKRPSGVPDRFSGSKSGNTASLTVSGLQAEDEADYYCSSYAGSNNFVFGCGTKVTVL

SEQ ID NO: 384 - protein, 506 aa, Artificial
  W9B / bispecific MOL I2E
QVQLVQSGAEVKKPGASVKVSCKASGYTFTDYHMHWVRQAPGQCLEWMGWIKPISGDTNYAQKFQGRVTMTRDTSISTAYMELSRLRSDDTAVYYCARDGYSSSWTLYYYYGMDVWGQGTTVTVSSGGGGSGGGGSGGGGSQSALTQPPSASGSPGQSVTSYCTGTSSDVGGYNYVSWYQQHPGKAPKLMIYEVSKRPSGVPDRFSGSKSGNTASLTVSGLQAEDEADYYCSSYAGSNNFVFGCGTKVTVLSGGGGSEVQLVESGGGLVQPGGSLKLSCAASGFTFNKYAINWVRQAPGKGLEWVARIRSKYNNYATYYADAVKDRFTISRDDSKNTVYLQMNNLKTEDTAVYYCARAGNFGSSYISYWAYWGQGTLVTVSSGGGGSGGGGSGGGGSQTVVTQEPSLTVSPGGTVTITCGSSTGAVTSGNYPNWVQKKPGQAPRGLIGGTKFLAPGTPARFSGSLSGGKAALTLSGVQPEDEAEYYCVLWYSNRWVFGSGTKLTVL

SEQ ID NO: 385 - protein, 994 aa, Artificial
  W9B / HLE BITE I2E
QVQLVQSGAEVKKPGASVKVSCKASGYTFTDYHMHWVRQAPGQCLEWMGWIKPISGDTNYAQKFQGRVTMTRDTSISTAYMELSRLRSDDTAVYYCARDGYSSSWTLYYYYGMDVWGQGTTVTVSSGGGGSGGGGSGGGGSQSALTQPPSASGSPGQSVTSYCTGTSSDVGGYNYVSWYQQHPGKAPKLMIYEVSKRPSGVPDRFSGSKSGNTASLTVSGLQAEDEADYYCSSYAGSNNFVFGCGTKVTVLSGGGGSEVQLVESGGGLVQPGGSLKLSCAASGFTFNKYAINWVRQAPGKGLEWVARIRSKYNNYATYYADAVKDRFTISRDDSKNTVYLQMNNLKTEDTAVYYCARAGNFGSSYISYWAYWGQGTLVTVSSGGGGSGGGGSGGGGSQTVVTQEPSLTVSPGGTVTITCGSSTGAVTSGNYPNWVQKKPGQAPRGLIGGTKFLAPGTPARFSGSLSGGKAALTLSGVQPEDEAEYYCVLWYSNRWVFGSGTKLTVLGGGGDKTHTCPPCPAPELLGGPSVFLFPPKPKDTLMISRTPEVTCVVVDVSHEDPEVKFNWYVDGVEVHNAKTKPCEEQYGSTYRCVSVLTVLHQDWLNGKEYKCKVSNKALPAPIEKTISKAKGQPREPQVYTLPPSREEMTKNQVSLTCLVKGFYPSDIAVEWESNGQPENNYKTTPPVLDSDGSFFLYSKLTVDKSRWQQGNVFSCSVMHEALHNHYTQKSLSLSPGKGGGGSGGGGSGGGGSGGGGSGGGGSGGGGSDKTHTCPPCPAPELLGGPSVFLFPPKPKDTLMISRTPEVTCVVVDVSHEDPEVKFNWYVDGVEVHNAKTKPCEEQYGSTYRCVSVLTVLHQDWLNGKEYKCKVSNKALPAPIEKTISKAKGQPREPQVYTLPPSREEMTKNQVSLTCLVKGFYPSDIAVEWESNGQPENNYKTTPPVLDSDGSFFLYSKLTVDKSRWQQGNVFSCSVMHEALHNHYTQKSLSLSPGK

SEQ ID NO: 386 - protein, 251 aa, Artificial; identical to SEQ ID NO: 383
  W9B / scFv I2C

SEQ ID NO: 387 - protein, 506 aa, Artificial
  W9B / bspecific MOL I2C
QVQLVQSGAEVKKPGASVKVSCKASGYTFTDYHMHWVRQAPGQCLEWMGWIKPISGDTNYAQKFQGRVTMTRDTSISTAYMELSRLRSDDTAVYYCARDGYSSSWTLYYYYGMDVWGQGTTVTVSSGGGGSGGGGSGGGGSQSALTQPPSASGSPGQSVTSYCTGTSSDVGGYNYVSWYQQHPGKAPKLMIYEVSKRPSGVPDRFSGSKSGNTASLTVSGLQAEDEADYYCSSYAGSNNFVFGCGTKVTVLSGGGGSEVQLVESGGGLVQPGGSLKLSCAASGFTFNKYAMNWVRQAPGKGLEWVARIRSKYNNYATYYADSVKDRFTISRDDSKNTAYLQMNNLKTEDTAVYYCVRHGNFGNSYISYWAYWGQGTLVTVSSGGGGSGGGGSGGGGSQTVVTQEPSLTVSPGGTVTLTCGSSTGAVTSGNYPNWVQQKPGQAPRGLIGGTKFLAPGTPARFSGSLLGGKAALTLSGVQPEDEAEYYCVLWYSNRWVFGGGTKLTVL

SEQ ID NO: 388 - protein, 994 aa, Artificial
  W9B / HLE BITE I2C
QVQLVQSGAEVKKPGASVKVSCKASGYTFTDYHMHWVRQAPGQCLEWMGWIKPISGDTNYAQKFQGRVTMTRDTSISTAYMELSRLRSDDTAVYYCARDGYSSSWTLYYYYGMDVWGQGTTVTVSSGGGGSGGGGSGGGGSQSALTQPPSASGSPGQSVTSYCTGTSSDVGGYNYVSWYQQHPGKAPKLMIYEVSKRPSGVPDRFSGSKSGNTASLTVSGLQAEDEADYYCSSYAGSNNFVFGCGTKVTVLSGGGGSEVQLVESGGGLVQPGGSLKLSCAASGFTFNKYAMNWVRQAPGKGLEWVARIRSKYNNYATYYADSVKDRFTISRDDSKNTAYLQMNNLKTEDTAVYYCVRHGNFGNSYISYWAYWGQGTLVTVSSGGGGSGGGGSGGGGSQTVVTQEPSLTVSPGGTVTLTCGSSTGAVTSGNYPNWVQQKPGQAPRGLIGGTKFLAPGTPARFSGSLLGGKAALTLSGVQPEDEAEYYCVLWYSNRWVFGGGTKLTVLGGGGDKTHTCPPCPAPELLGGPSVFLFPPKPKDTLMISRTPEVTCVVVDVSHEDPEVKFNWYVDGVEVHNAKTKPCEEQYGSTYRCVSVLTVLHQDWLNGKEYKCKVSNKALPAPIEKTISKAKGQPREPQVYTLPPSREEMTKNQVSLTCLVKGFYPSDIAVEWESNGQPENNYKTTPPVLDSDGSFFLYSKLTVDKSRWQQGNVFSCSVMHEALHNHYTQKSLSLSPGKGGGGSGGGGSGGGGSGGGGSGGGGSGGGGSDKTHTCPPCPAPELLGGPSVFLFPPKPKDTLMISRTPEVTCVVVDVSHEDPEVKFNWYVDGVEVHNAKTKPCEEQYGSTYRCVSVLTVLHQDWLNGKEYKCKVSNKALPAPIEKTISKAKGQPREPQVYTLPPSREEMTKNQVSLTCLVKGFYPSDIAVEWESNGQPENNYKTTPPVLDSDGSFFLYSKLTVDKSRWQQGNVFSCSVMHEALHNHYTQKSLSLSPGK

SEQ ID NO: 389 - protein, 126 aa, Artificial; identical to SEQ ID NO: 333
  VH of A9G

SEQ ID NO: 390 - protein, 110 aa, Artificial; identical to SEQ ID NO: 292
  VL of A9G

SEQ ID NO: 391 - protein, 5 aa, Artificial
  CDR-H1 of A9G
DYHMH

SEQ ID NO: 392 - protein, 17 aa, Artificial
  CDR-H2 of A9G
WIKPISGDANYAQKFQG

SEQ ID NO: 393 - protein, 17 aa, Artificial
  CDR-H3 of A9G
DYYSSSWTLYYYYGMDV

SEQ ID NO: 394 - protein, 14 aa, Artificial
  CDR-L1 of A9G
TGTSSDVGGYNYVS

SEQ ID NO: 395 - protein, 7 aa, Artificial
  CDR-L2 of A9G
EVSKRPS

SEQ ID NO: 396 - protein, 10 aa, Artificial
  CDR-L3 of A9G
SSYAGSNNFV

SEQ ID NO: 397 - protein, 251 aa, Artificial
  A9G / scFv I2E
QVQLVQSGAEVKKPGASVKVSCKASGYTFTDYHMHWVRQAPGQCLEWMGWIKPISGDANYAQKFQGRVTMTRDTSISTAYMELSRLRSDDTAVYYCARDYYSSSWTLYYYYGMDVWGQGTTVTVSSGGGGSGGGGSGGGGSQSALTQPPSASGSPGQSVTISCTGTSSDVGGYNYVSWYQQHPGKAPKLMIYEVSKRPSGVPDRFSGSKSGNTASLTVSGLQAEDEADYYCSSYAGSNNFVFGCGTKVTVL

SEQ ID NO: 398 - protein, 506 aa, Artificial
  A9G / bispecific MOL I2E
QVQLVQSGAEVKKPGASVKVSCKASGYTFTDYHMHWVRQAPGQCLEWMGWIKPISGDANYAQKFQGRVTMTRDTSISTAYMELSRLRSDDTAVYYCARDYYSSSWTLYYYYGMDVWGQGTTVTVSSGGGGSGGGGSGGGGSQSALTQPPSASGSPGQSVTISCTGTSSDVGGYNYVSWYQQHPGKAPKLMIYEVSKRPSGVPDRFSGSKSGNTASLTVSGLQAEDEADYYCSSYAGSNNFVFGCGTKVTVLSGGGGSEVQLVESGGGLVQPGGSLKLSCAASGFTFNKYAINWVRQAPGKGLEWVARIRSKYNNYATYYADAVKDRFTISRDDSKNTVYLQMNNLKTEDTAVYYCARAGNFGSSYISYWAYWGQGTLVTVSSGGGGSGGGGSGGGGSQTVVTQEPSLTVSPGGTVTITCGSSTGAVTSGNYPNWVQKKPGQAPRGLIGGTKFLAPGTPARFSGSLSGGKAALTLSGVQPEDEAEYYCVLWYSNRWVFGSGTKLTVL

SEQ ID NO: 399 - protein, 994 aa, Artificial
  A9G / HLE-BITE I2E
QVQLVQSGAEVKKPGASVKVSCKASGYTFTDYHMHWVRQAPGQCLEWMGWIKPISGDANYAQKFQGRVTMTRDTSISTAYMELSRLRSDDTAVYYCARDYYSSSWTLYYYYGMDVWGQGTTVTVSSGGGGSGGGGSGGGGSQSALTQPPSASGSPGQSVTISCTGTSSDVGGYNYVSWYQQHPGKAPKLMIYEVSKRPSGVPDRFSGSKSGNTASLTVSGLQAEDEADYYCSSYAGSNNFVFGCGTKVTVLSGGGGSEVQLVESGGGLVQPGGSLKLSCAASGFTFNKYAINWVRQAPGKGLEWVARIRSKYNNYATYYADAVKDRFTISRDDSKNTVYLQMNNLKTEDTAVYYCARAGNFGSSYISYWAYWGQGTLVTVSSGGGGSGGGGSGGGGSQTVVTQEPSLTVSPGGTVTITCGSSTGAVTSGNYPNWVQKKPGQAPRGLIGGTKFLAPGTPARFSGSLSGGKAALTLSGVQPEDEAEYYCVLWYSNRWVFGSGTKLTVLGGGGDKTHTCPPCPAPELLGGPSVFLFPPKPKDTLMISRTPEVTCVVVDVSHEDPEVKFNWYVDGVEVHNAKTKPCEEQYGSTYRCVSVLTVLHQDWLNGKEYKCKVSNKALPAPIEKTISKAKGQPREPQVYTLPPSREEMTKNQVSLTCLVKGFYPSDIAVEWESNGQPENNYKTTPPVLDSDGSFFLYSKLTVDKSRWQQGNVFSCSVMHEALHNHYTQKSLSLSPGKGGGGSGGGGSGGGGSGGGGSGGGGSGGGGSDKTHTCPPCPAPELLGGPSVFLFPPKPKDTLMISRTPEVTCVVVDVSHEDPEVKFNWYVDGVEVHNAKTKPCEEQYGSTYRCVSVLTVLHQDWLNGKEYKCKVSNKALPAPIEKTISKAKGQPREPQVYTLPPSREEMTKNQVSLTCLVKGFYPSDIAVEWESNGQPENNYKTTPPVLDSDGSFFLYSKLTVDKSRWQQGNVFSCSVMHEALHNHYTQKSLSLSPGK

SEQ ID NO: 400 - protein, 251 aa, Artificial; identical to SEQ ID NO: 397
  A9G / scFv I2C

SEQ ID NO: 401 - protein, 506 aa, Artificial
  A9G / bispecific MOL I2C
QVQLVQSGAEVKKPGASVKVSCKASGYTFTDYHMHWVRQAPGQCLEWMGWIKPISGDANYAQKFQGRVTMTRDTSISTAYMELSRLRSDDTAVYYCARDYYSSSWTLYYYYGMDVWGQGTTVTVSSGGGGSGGGGSGGGGSQSALTQPPSASGSPGQSVTISCTGTSSDVGGYNYVSWYQQHPGKAPKLMIYEVSKRPSGVPDRFSGSKSGNTASLTVSGLQAEDEADYYCSSYAGSNNFVFGCGTKVTVLSGGGGSEVQLVESGGGLVQPGGSLKLSCAASGFTFNKYAMNWVRQAPGKGLEWVARIRSKYNNYATYYADSVKDRFTISRDDSKNTAYLQMNNLKTEDTAVYYCVRHGNFGNSYISYWAYWGQGTLVTVSSGGGGSGGGGSGGGGSQTVVTQEPSLTVSPGGTVTLTCGSSTGAVTSGNYPNWVQQKPGQAPRGLIGGTKFLAPGTPARFSGSLLGGKAALTLSGVQPEDEAEYYCVLWYSNRWVFGGGTKLTVL

SEQ ID NO: 402 - protein, 994 aa, Artificial
  A9G / HLE BITE I2C
QVQLVQSGAEVKKPGASVKVSCKASGYTFTDYHMHWVRQAPGQCLEWMGWIKPISGDANYAQKFQGRVTMTRDTSISTAYMELSRLRSDDTAVYYCARDYYSSSWTLYYYYGMDVWGQGTTVTVSSGGGGSGGGGSGGGGSQSALTQPPSASGSPGQSVTISCTGTSSDVGGYNYVSWYQQHPGKAPKLMIYEVSKRPSGVPDRFSGSKSGNTASLTVSGLQAEDEADYYCSSYAGSNNFVFGCGTKVTVLSGGGGSEVQLVESGGGLVQPGGSLKLSCAASGFTFNKYAMNWVRQAPGKGLEWVARIRSKYNNYATYYADSVKDRFTISRDDSKNTAYLQMNNLKTEDTAVYYCVRHGNFGNSYISYWAYWGQGTLVTVSSGGGGSGGGGSGGGGSQTVVTQEPSLTVSPGGTVTLTCGSSTGAVTSGNYPNWVQQKPGQAPRGLIGGTKFLAPGTPARFSGSLLGGKAALTLSGVQPEDEAEYYCVLWYSNRWVFGGGTKLTVLGGGGDKTHTCPPCPAPELLGGPSVFLFPPKPKDTLMISRTPEVTCVVVDVSHEDPEVKFNWYVDGVEVHNAKTKPCEEQYGSTYRCVSVLTVLHQDWLNGKEYKCKVSNKALPAPIEKTISKAKGQPREPQVYTLPPSREEMTKNQVSLTCLVKGFYPSDIAVEWESNGQPENNYKTTPPVLDSDGSFFLYSKLTVDKSRWQQGNVFSCSVMHEALHNHYTQKSLSLSPGKGGGGSGGGGSGGGGSGGGGSGGGGSGGGGSDKTHTCPPCPAPELLGGPSVFLFPPKPKDTLMISRTPEVTCVVVDVSHEDPEVKFNWYVDGVEVHNAKTKPCEEQYGSTYRCVSVLTVLHQDWLNGKEYKCKVSNKALPAPIEKTISKAKGQPREPQVYTLPPSREEMTKNQVSLTCLVKGFYPSDIAVEWESNGQPENNYKTTPPVLDSDGSFFLYSKLTVDKSRWQQGNVFSCSVMHEALHNHYTQKSLSLSPGK

SEQ ID NO: 403 - protein, 126 aa, Artificial
  VH of D3F
QVQLVQSGAEVKKPGASVKVSCKASGYTFTDYHMHWVRQAPGQCLEWMGWIKPISGDTNYAQKFQGRVTMTRDTSISTAYMELSRLRSDDTAVYYCARDYYSSSWTLYYYYGMDVWGQGTTVTVSS

SEQ ID NO: 404 - protein, 110 aa, Artificial; identical to SEQ ID NO: 320
  VL of D3F

SEQ ID NO: 405 - protein, 5 aa, Artificial
  CDR-H1 of D3F
DYHMH

SEQ ID NO: 406 - protein, 17 aa, Artificial
  CDR-H2 of D3F
WIKPISGDTNYAQKFQG

SEQ ID NO: 407 - protein, 17 aa, Artificial
  CDR-H3 of D3F
DYYSSSWTLYYYYGMDV

SEQ ID NO: 408 - protein, 14 aa, Artificial
  CDR-L1 of D3F
TGTSSDVGGYNYVS

SEQ ID NO: 409 - protein, 7 aa, Artificial
  CDR-L2 of D3F
EVSKRPS

SEQ ID NO: 410 - protein, 10 aa, Artificial
  CDR-L3 of D3F
SSYAGSNNFV

SEQ ID NO: 411 - protein, 251 aa, Artificial
  D3F / scFv I2E
QVQLVQSGAEVKKPGASVKVSCKASGYTFTDYHMHWVRQAPGQCLEWMGWIKPISGDTNYAQKFQGRVTMTRDTSISTAYMELSRLRSDDTAVYYCARDYYSSSWTLYYYYGMDVWGQGTTVTVSSGGGGSGGGGSGGGGSQSALTQPPSASGSPGQSVTSYCTGTSSDVGGYNYVSWYQQHPGKAPKLMIYEVSKRPSGVPDRFSGSKSGNTASLTVSGLQAEDEADYYCSSYAGSNNFVFGCGTKVTVL

SEQ ID NO: 412 - protein, 506 aa, Artificial
  D3F / bispecific MOL I2E
QVQLVQSGAEVKKPGASVKVSCKASGYTFTDYHMHWVRQAPGQCLEWMGWIKPISGDTNYAQKFQGRVTMTRDTSISTAYMELSRLRSDDTAVYYCARDYYSSSWTLYYYYGMDVWGQGTTVTVSSGGGGSGGGGSGGGGSQSALTQPPSASGSPGQSVTSYCTGTSSDVGGYNYVSWYQQHPGKAPKLMIYEVSKRPSGVPDRFSGSKSGNTASLTVSGLQAEDEADYYCSSYAGSNNFVFGCGTKVTVLSGGGGSEVQLVESGGGLVQPGGSLKLSCAASGFTFNKYAINWVRQAPGKGLEWVARIRSKYNNYATYYADAVKDRFTISRDDSKNTVYLQMNNLKTEDTAVYYCARAGNFGSSYISYWAYWGQGTLVTVSSGGGGSGGGGSGGGGSQTVVTQEPSLTVSPGGTVTITCGSSTGAVTSGNYPNWVQKKPGQAPRGLIGGTKFLAPGTPARFSGSLSGGKAALTLSGVQPEDEAEYYCVLWYSNRWVFGSGTKLTVL

SEQ ID NO: 413 - protein, 994 aa, Artificial
  D3F / HLE-BITE I2E
QVQLVQSGAEVKKPGASVKVSCKASGYTFTDYHMHWVRQAPGQCLEWMGWIKPISGDTNYAQKFQGRVTMTRDTSISTAYMELSRLRSDDTAVYYCARDYYSSSWTLYYYYGMDVWGQGTTVTVSSGGGGSGGGGSGGGGSQSALTQPPSASGSPGQSVTSYCTGTSSDVGGYNYVSWYQQHPGKAPKLMIYEVSKRPSGVPDRFSGSKSGNTASLTVSGLQAEDEADYYCSSYAGSNNFVFGCGTKVTVLSGGGGSEVQLVESGGGLVQPGGSLKLSCAASGFTFNKYAINWVRQAPGKGLEWVARIRSKYNNYATYYADAVKDRFTISRDDSKNTVYLQMNNLKTEDTAVYYCARAGNFGSSYISYWAYWGQGTLVTVSSGGGGSGGGGSGGGGSQTVVTQEPSLTVSPGGTVTITCGSSTGAVTSGNYPNWVQKKPGQAPRGLIGGTKFLAPGTPARFSGSLSGGKAALTLSGVQPEDEAEYYCVLWYSNRWVFGSGTKLTVLGGGGDKTHTCPPCPAPELLGGPSVFLFPPKPKDTLMISRTPEVTCVVVDVSHEDPEVKFNWYVDGVEVHNAKTKPCEEQYGSTYRCVSVLTVLHQDWLNGKEYKCKVSNKALPAPIEKTISKAKGQPREPQVYTLPPSREEMTKNQVSLTCLVKGFYPSDIAVEWESNGQPENNYKTTPPVLDSDGSFFLYSKLTVDKSRWQQGNVFSCSVMHEALHNHYTQKSLSLSPGKGGGGSGGGGSGGGGSGGGGSGGGGSGGGGSDKTHTCPPCPAPELLGGPSVFLFPPKPKDTLMISRTPEVTCVVVDVSHEDPEVKFNWYVDGVEVHNAKTKPCEEQYGSTYRCVSVLTVLHQDWLNGKEYKCKVSNKALPAPIEKTISKAKGQPREPQVYTLPPSREEMTKNQVSLTCLVKGFYPSDIAVEWESNGQPENNYKTTPPVLDSDGSFFLYSKLTVDKSRWQQGNVFSCSVMHEALHNHYTQKSLSLSPGK

SEQ ID NO: 414 - protein, 251 aa, Artificial; identical to SEQ ID NO: 411
  D3F / scFv I2C

SEQ ID NO: 415 - protein, 506 aa, Artificial
  D3F / bispecific MOL I2C
QVQLVQSGAEVKKPGASVKVSCKASGYTFTDYHMHWVRQAPGQCLEWMGWIKPISGDTNYAQKFQGRVTMTRDTSISTAYMELSRLRSDDTAVYYCARDYYSSSWTLYYYYGMDVWGQGTTVTVSSGGGGSGGGGSGGGGSQSALTQPPSASGSPGQSVTSYCTGTSSDVGGYNYVSWYQQHPGKAPKLMIYEVSKRPSGVPDRFSGSKSGNTASLTVSGLQAEDEADYYCSSYAGSNNFVFGCGTKVTVLSGGGGSEVQLVESGGGLVQPGGSLKLSCAASGFTFNKYAMNWVRQAPGKGLEWVARIRSKYNNYATYYADSVKDRFTISRDDSKNTAYLQMNNLKTEDTAVYYCVRHGNFGNSYISYWAYWGQGTLVTVSSGGGGSGGGGSGGGGSQTVVTQEPSLTVSPGGTVTLTCGSSTGAVTSGNYPNWVQQKPGQAPRGLIGGTKFLAPGTPARFSGSLLGGKAALTLSGVQPEDEAEYYCVLWYSNRWVFGGGTKLTVL

SEQ ID NO: 416 - protein, 994 aa, Artificial
  D3F / HLE BITE I2C
QVQLVQSGAEVKKPGASVKVSCKASGYTFTDYHMHWVRQAPGQCLEWMGWIKPISGDTNYAQKFQGRVTMTRDTSISTAYMELSRLRSDDTAVYYCARDYYSSSWTLYYYYGMDVWGQGTTVTVSSGGGGSGGGGSGGGGSQSALTQPPSASGSPGQSVTSYCTGTSSDVGGYNYVSWYQQHPGKAPKLMIYEVSKRPSGVPDRFSGSKSGNTASLTVSGLQAEDEADYYCSSYAGSNNFVFGCGTKVTVLSGGGGSEVQLVESGGGLVQPGGSLKLSCAASGFTFNKYAMNWVRQAPGKGLEWVARIRSKYNNYATYYADSVKDRFTISRDDSKNTAYLQMNNLKTEDTAVYYCVRHGNFGNSYISYWAYWGQGTLVTVSSGGGGSGGGGSGGGGSQTVVTQEPSLTVSPGGTVTLTCGSSTGAVTSGNYPNWVQQKPGQAPRGLIGGTKFLAPGTPARFSGSLLGGKAALTLSGVQPEDEAEYYCVLWYSNRWVFGGGTKLTVLGGGGDKTHTCPPCPAPELLGGPSVFLFPPKPKDTLMISRTPEVTCVVVDVSHEDPEVKFNWYVDGVEVHNAKTKPCEEQYGSTYRCVSVLTVLHQDWLNGKEYKCKVSNKALPAPIEKTISKAKGQPREPQVYTLPPSREEMTKNQVSLTCLVKGFYPSDIAVEWESNGQPENNYKTTPPVLDSDGSFFLYSKLTVDKSRWQQGNVFSCSVMHEALHNHYTQKSLSLSPGKGGGGSGGGGSGGGGSGGGGSGGGGSGGGGSDKTHTCPPCPAPELLGGPSVFLFPPKPKDTLMISRTPEVTCVVVDVSHEDPEVKFNWYVDGVEVHNAKTKPCEEQYGSTYRCVSVLTVLHQDWLNGKEYKCKVSNKALPAPIEKTISKAKGQPREPQVYTLPPSREEMTKNQVSLTCLVKGFYPSDIAVEWESNGQPENNYKTTPPVLDSDGSFFLYSKLTVDKSRWQQGNVFSCSVMHEALHNHYTQKSLSLSPGK

SEQ ID NO: 417 - protein, 126 aa, Artificial
  VH of E4N
QVQLVQSGAEVKKPGASVKVSCKASGYTFTDYHMHWVRQAPGQCLEWMGWIKPISGDANYAQKFQGRVTMTRDTSISTAYMELSRLRSDDTAVYYCARDYYSSSFTLYYYYGMDVWGQGTTVTVSS

SEQ ID NO: 418 - protein, 110 aa, Artificial; identical to SEQ ID NO: 292
  VL of E4N

SEQ ID NO: 419 - protein, 5 aa, Artificial
  CDR-H1 of E4N
DYHMH

SEQ ID NO: 420 - protein, 17 aa, Artificial
  CDR-H2 of E4N
WIKPISGDANYAQKFQG

SEQ ID NO: 421 - protein, 17 aa, Artificial
  CDR-H3 of E4N
DYYSSSFTLYYYYGMDV

SEQ ID NO: 422 - protein, 14 aa, Artificial
  CDR-L1 of E4N
TGTSSDVGGYNYVS

SEQ ID NO: 423 - protein, 7 aa, Artificial
  CDR-L2 of E4N
EVSKRPS

SEQ ID NO: 424 - protein, 10 aa, Artificial
  CDR-L3 of E4N
SSYAGSNNFV

SEQ ID NO: 425 - protein, 251 aa, Artificial
  E4N / scFv I2E
QVQLVQSGAEVKKPGASVKVSCKASGYTFTDYHMHWVRQAPGQCLEWMGWIKPISGDANYAQKFQGRVTMTRDTSISTAYMELSRLRSDDTAVYYCARDYYSSSFTLYYYYGMDVWGQGTTVTVSSGGGGSGGGGSGGGGSQSALTQPPSASGSPGQSVTISCTGTSSDVGGYNYVSWYQQHPGKAPKLMIYEVSKRPSGVPDRFSGSKSGNTASLTVSGLQAEDEADYYCSSYAGSNNFVFGCGTKVTVL

SEQ ID NO: 426 - protein, 506 aa, Artificial
  E4N / bispecific MOL I2E
QVQLVQSGAEVKKPGASVKVSCKASGYTFTDYHMHWVRQAPGQCLEWMGWIKPISGDANYAQKFQGRVTMTRDTSISTAYMELSRLRSDDTAVYYCARDYYSSSFTLYYYYGMDVWGQGTTVTVSSGGGGSGGGGSGGGGSQSALTQPPSASGSPGQSVTISCTGTSSDVGGYNYVSWYQQHPGKAPKLMIYEVSKRPSGVPDRFSGSKSGNTASLTVSGLQAEDEADYYCSSYAGSNNFVFGCGTKVTVLSGGGGSEVQLVESGGGLVQPGGSLKLSCAASGFTFNKYAINWVRQAPGKGLEWVARIRSKYNNYATYYADAVKDRFTISRDDSKNTVYLQMNNLKTEDTAVYYCARAGNFGSSYISYWAYWGQGTLVTVSSGGGGSGGGGSGGGGSQTVVTQEPSLTVSPGGTVTITCGSSTGAVTSGNYPNWVQKKPGQAPRGLIGGTKFLAPGTPARFSGSLSGGKAALTLSGVQPEDEAEYYCVLWYSNRWVFGSGTKLTVL

SEQ ID NO: 427 - protein, 994 aa, Artificial
  E4N / HLE BITE I2E
QVQLVQSGAEVKKPGASVKVSCKASGYTFTDYHMHWVRQAPGQCLEWMGWIKPISGDANYAQKFQGRVTMTRDTSISTAYMELSRLRSDDTAVYYCARDYYSSSFTLYYYYGMDVWGQGTTVTVSSGGGGSGGGGSGGGGSQSALTQPPSASGSPGQSVTISCTGTSSDVGGYNYVSWYQQHPGKAPKLMIYEVSKRPSGVPDRFSGSKSGNTASLTVSGLQAEDEADYYCSSYAGSNNFVFGCGTKVTVLSGGGGSEVQLVESGGGLVQPGGSLKLSCAASGFTFNKYAINWVRQAPGKGLEWVARIRSKYNNYATYYADAVKDRFTISRDDSKNTVYLQMNNLKTEDTAVYYCARAGNFGSSYISYWAYWGQGTLVTVSSGGGGSGGGGSGGGGSQTVVTQEPSLTVSPGGTVTITCGSSTGAVTSGNYPNWVQKKPGQAPRGLIGGTKFLAPGTPARFSGSLSGGKAALTLSGVQPEDEAEYYCVLWYSNRWVFGSGTKLTVLGGGGDKTHTCPPCPAPELLGGPSVFLFPPKPKDTLMISRTPEVTCVVVDVSHEDPEVKFNWYVDGVEVHNAKTKPCEEQYGSTYRCVSVLTVLHQDWLNGKEYKCKVSNKALPAPIEKTISKAKGQPREPQVYTLPPSREEMTKNQVSLTCLVKGFYPSDIAVEWESNGQPENNYKTTPPVLDSDGSFFLYSKLTVDKSRWQQGNVFSCSVMHEALHNHYTQKSLSLSPGKGGGGSGGGGSGGGGSGGGGSGGGGSGGGGSDKTHTCPPCPAPELLGGPSVFLFPPKPKDTLMISRTPEVTCVVVDVSHEDPEVKFNWYVDGVEVHNAKTKPCEEQYGSTYRCVSVLTVLHQDWLNGKEYKCKVSNKALPAPIEKTISKAKGQPREPQVYTLPPSREEMTKNQVSLTCLVKGFYPSDIAVEWESNGQPENNYKTTPPVLDSDGSFFLYSKLTVDKSRWQQGNVFSCSVMHEALHNHYTQKSLSLSPGK

SEQ ID NO: 428 - protein, 251 aa, Artificial; identical to SEQ ID NO: 425
  E4N / scFv I2C

SEQ ID NO: 429 - protein, 506 aa, Artificial
  E4N / bispecific MOL I2C
QVQLVQSGAEVKKPGASVKVSCKASGYTFTDYHMHWVRQAPGQCLEWMGWIKPISGDANYAQKFQGRVTMTRDTSISTAYMELSRLRSDDTAVYYCARDYYSSSFTLYYYYGMDVWGQGTTVTVSSGGGGSGGGGSGGGGSQSALTQPPSASGSPGQSVTISCTGTSSDVGGYNYVSWYQQHPGKAPKLMIYEVSKRPSGVPDRFSGSKSGNTASLTVSGLQAEDEADYYCSSYAGSNNFVFGCGTKVTVLSGGGGSEVQLVESGGGLVQPGGSLKLSCAASGFTFNKYAMNWVRQAPGKGLEWVARIRSKYNNYATYYADSVKDRFTISRDDSKNTAYLQMNNLKTEDTAVYYCVRHGNFGNSYISYWAYWGQGTLVTVSSGGGGSGGGGSGGGGSQTVVTQEPSLTVSPGGTVTLTCGSSTGAVTSGNYPNWVQQKPGQAPRGLIGGTKFLAPGTPARFSGSLLGGKAALTLSGVQPEDEAEYYCVLWYSNRWVFGGGTKLTVL

SEQ ID NO: 430 - protein, 994 aa, Artificial
  E4N / HLE BITE I2C
QVQLVQSGAEVKKPGASVKVSCKASGYTFTDYHMHWVRQAPGQCLEWMGWIKPISGDANYAQKFQGRVTMTRDTSISTAYMELSRLRSDDTAVYYCARDYYSSSFTLYYYYGMDVWGQGTTVTVSSGGGGSGGGGSGGGGSQSALTQPPSASGSPGQSVTISCTGTSSDVGGYNYVSWYQQHPGKAPKLMIYEVSKRPSGVPDRFSGSKSGNTASLTVSGLQAEDEADYYCSSYAGSNNFVFGCGTKVTVLSGGGGSEVQLVESGGGLVQPGGSLKLSCAASGFTFNKYAMNWVRQAPGKGLEWVARIRSKYNNYATYYADSVKDRFTISRDDSKNTAYLQMNNLKTEDTAVYYCVRHGNFGNSYISYWAYWGQGTLVTVSSGGGGSGGGGSGGGGSQTVVTQEPSLTVSPGGTVTLTCGSSTGAVTSGNYPNWVQQKPGQAPRGLIGGTKFLAPGTPARFSGSLLGGKAALTLSGVQPEDEAEYYCVLWYSNRWVFGGGTKLTVLGGGGDKTHTCPPCPAPELLGGPSVFLFPPKPKDTLMISRTPEVTCVVVDVSHEDPEVKFNWYVDGVEVHNAKTKPCEEQYGSTYRCVSVLTVLHQDWLNGKEYKCKVSNKALPAPIEKTISKAKGQPREPQVYTLPPSREEMTKNQVSLTCLVKGFYPSDIAVEWESNGQPENNYKTTPPVLDSDGSFFLYSKLTVDKSRWQQGNVFSCSVMHEALHNHYTQKSLSLSPGKGGGGSGGGGSGGGGSGGGGSGGGGSGGGGSDKTHTCPPCPAPELLGGPSVFLFPPKPKDTLMISRTPEVTCVVVDVSHEDPEVKFNWYVDGVEVHNAKTKPCEEQYGSTYRCVSVLTVLHQDWLNGKEYKCKVSNKALPAPIEKTISKAKGQPREPQVYTLPPSREEMTKNQVSLTCLVKGFYPSDIAVEWESNGQPENNYKTTPPVLDSDGSFFLYSKLTVDKSRWQQGNVFSCSVMHEALHNHYTQKSLSLSPGK

SEQ ID NO: 431 - protein, 5 aa, Artificial
  CL6 AE3-20 X I2C X SCFC / HCDR1
SYTMS

SEQ ID NO: 432 - protein, 17 aa, Artificial
  CL6 AE3-20 / HCDR2
TISSGGGRTYYPDSVKG

SEQ ID NO: 433 - protein, 10 aa, Artificial
  CL6 AE3-20 / HCDR3
GDYRYDGFAY

SEQ ID NO: 434 - protein, 11 aa, Artificial
  CL6 AE3-20 / LCDR1
RASENIDSYLA

SEQ ID NO: 435 - protein, 7 aa, Artificial
  CL6 AE3-20 / LCDR2
ASTLLVD

SEQ ID NO: 436 - protein, 9 aa, Artificial
  CL6 AE3-20 / LCDR3
QHYYSIPYT

SEQ ID NO: 437 - protein, 119 aa, Artificial
  CL6 AE3-20 / VH
EVKLVESGGGLVKPGGSLKLSCAASGFTFNSYTMSWVRQTPAKRLEWVVTISSGGGRTYYPDSVKGRFTISRDNARNTLYLQMSSLRSEDTAMYYCIRGDYRYDGFAYWGQGTLVTVST

SEQ ID NO: 438 - protein, 107 aa, Artificial
  CL6 AE3-20 / VL
DIQMTQSPASLSASVGETVTITCRASENIDSYLAWYQQKQGKSPQLLVYASTLLVDGVPSRFSGSRSGTQFSLKINSLQSEDVARYYCQHYYSIPYTFGSGTKLEIK

SEQ ID NO: 439 - protein, 241 aa, Artificial
  CL6 AE3-20 / SCFV
EVKLVESGGGLVKPGGSLKLSCAASGFTFNSYTMSWVRQTPAKRLEWVVTISSGGGRTYYPDSVKGRFTISRDNARNTLYLQMSSLRSEDTAMYYCIRGDYRYDGFAYWGQGTLVTVSTGGGGSGGGGSGGGGSDIQMTQSPASLSASVGETVTITCRASENIDSYLAWYQQKQGKSPQLLVYASTLLVDGVPSRFSGSRSGTQFSLKINSLQSEDVARYYCQHYYSIPYTFGSGTKLEIK

SEQ ID NO: 440 - protein, 496 aa, Artificial
  CL6 AE3-20 / BISPECIFIC MOL
EVKLVESGGGLVKPGGSLKLSCAASGFTFNSYTMSWVRQTPAKRLEWVVTISSGGGRTYYPDSVKGRFTISRDNARNTLYLQMSSLRSEDTAMYYCIRGDYRYDGFAYWGQGTLVTVSTGGGGSGGGGSGGGGSDIQMTQSPASLSASVGETVTITCRASENIDSYLAWYQQKQGKSPQLLVYASTLLVDGVPSRFSGSRSGTQFSLKINSLQSEDVARYYCQHYYSIPYTFGSGTKLEIKSGGGGSEVQLVESGGGLVQPGGSLKLSCAASGFTFNKYAMNWVRQAPGKGLEWVARIRSKYNNYATYYADSVKDRFTISRDDSKNTAYLQMNNLKTEDTAVYYCVRHGNFGNSYISYWAYWGQGTLVTVSSGGGGSGGGGSGGGGSQTVVTQEPSLTVSPGGTVTLTCGSSTGAVTSGNYPNWVQQKPGQAPRGLIGGTKFLAPGTPARFSGSLLGGKAALTLSGVQPEDEAEYYCVLWYSNRWVFGGGTKLTVL

SEQ ID NO: 441 - protein, 984 aa, Artificial
  CL6 AE3-20 / HLE-BITE I2E
EVKLVESGGGLVKPGGSLKLSCAASGFTFNSYTMSWVRQTPAKRLEWVVTISSGGGRTYYPDSVKGRFTISRDNARNTLYLQMSSLRSEDTAMYYCIRGDYRYDGFAYWGQGTLVTVSTGGGGSGGGGSGGGGSDIQMTQSPASLSASVGETVTITCRASENIDSYLAWYQQKQGKSPQLLVYASTLLVDGVPSRFSGSRSGTQFSLKINSLQSEDVARYYCQHYYSIPYTFGSGTKLEIKSGGGGSEVQLVESGGGLVQPGGSLKLSCAASGFTFNKYAMNWVRQAPGKGLEWVARIRSKYNNYATYYADSVKDRFTISRDDSKNTAYLQMNNLKTEDTAVYYCVRHGNFGNSYISYWAYWGQGTLVTVSSGGGGSGGGGSGGGGSQTVVTQEPSLTVSPGGTVTLTCGSSTGAVTSGNYPNWVQQKPGQAPRGLIGGTKFLAPGTPARFSGSLLGGKAALTLSGVQPEDEAEYYCVLWYSNRWVFGGGTKLTVLGGGGDKTHTCPPCPAPELLGGPSVFLFPPKPKDTLMISRTPEVTCVVVDVSHEDPEVKFNWYVDGVEVHNAKTKPCEEQYGSTYRCVSVLTVLHQDWLNGKEYKCKVSNKALPAPIEKTISKAKGQPREPQVYTLPPSREEMTKNQVSLTCLVKGFYPSDIAVEWESNGQPENNYKTTPPVLDSDGSFFLYSKLTVDKSRWQQGNVFSCSVMHEALHNHYTQKSLSLSPGKGGGGSGGGGSGGGGSGGGGSGGGGSGGGGSDKTHTCPPCPAPELLGGPSVFLFPPKPKDTLMISRTPEVTCVVVDVSHEDPEVKFNWYVDGVEVHNAKTKPCEEQYGSTYRCVSVLTVLHQDWLNGKEYKCKVSNKALPAPIEKTISKAKGQPREPQVYTLPPSREEMTKNQVSLTCLVKGFYPSDIAVEWESNGQPENNYKTTPPVLDSDGSFFLYSKLTVDKSRWQQGNVFSCSVMHEALHNHYTQKSLSLSPGK

SEQ ID NO: 442 - protein, 105 aa, Artificial
  Human CD3  ECD
QDGNEEMGGITQTPYKVSISGTTVILTCPQYPGSEILWQHNDKNIGGDEDDKNIGSDEDHLSLKEFSELEQSGYYVCYPRGSKPEDANFYLYLRARVCENCMEMD

SEQ ID NO: 443 - protein, 27 aa, Artificial
  Human CD3  ECD / pos. 1-27
QDGNEEMGGITQTPYKVSISGTTVILT

SEQ ID NO: 444 - protein, 14 aa, Artificial
  CDR-L1 of H2C
GSSTGAVTSGYYPN

SEQ ID NO: 445 - protein, 7 aa, Artificial
  CDR-L2 of H2C
GTKFLAP

SEQ ID NO: 446 - protein, 9 aa, Artificial
  CDR-L3 of H2C
ALWYSNRWV

SEQ ID NO: 447 - protein, 14 aa, Artificial
  CDR-L1 of E2M
RSSTGAVTSGYYPN

SEQ ID NO: 448 - protein, 7 aa, Artificial
  CDR-L2 of E2M
ATDMRPS

SEQ ID NO: 449 - protein, 9 aa, Artificial
  CDR-L3 of E2M
ALWYSNRWV

SEQ ID NO: 450 - protein, 14 aa, Artificial
  CDR-L1 of F12Q
GSSTGAVTSGNYPN

SEQ ID NO: 451 - protein, 7 aa, Artificial
  CDR-L2 of F12Q
GTKFLAP

SEQ ID NO: 452 - protein, 9 aa, Artificial
  CDR-L3 of F12Q
VLWYSNRWV

SEQ ID NO: 453 - protein, 5 aa, Artificial
  CDR-H1 of F6A
IYAMN

SEQ ID NO: 454 - protein, 19 aa, Artificial
  CDR-H2 of F6A
RIRSKYNNYATYYADSVKS

SEQ ID NO: 455 - protein, 14 aa, Artificial
  CDR-H3 of F6A
HGNFGNSYVSFFAY

SEQ ID NO: 456 - protein, 5 aa, Artificial
  CDR-H1 of H2C
KYAMN

SEQ ID NO: 457 - protein, 19 aa, Artificial
  CDR-H2 of H2C
RIRSKYNNYATYYADSVKD

SEQ ID NO: 458 - protein, 14 aa, Artificial
  CDR-H3 of H2C
HGNFGNSYISYWAY

SEQ ID NO: 459 - protein, 5 aa, Artificial
  CDR-H1 of H1E
SYAMN

SEQ ID NO: 460 - protein, 19 aa, Artificial
  CDR-H2 of H1E
RIRSKYNNYATYYADSVKG

SEQ ID NO: 461 - protein, 14 aa, Artificial
  CDR-H3 of H1E
HGNFGNSYLSFWAY

SEQ ID NO: 462 - protein, 5 aa, Artificial
  CDR-H1 of G4H
RYAMN

SEQ ID NO: 463 - protein, 19 aa, Artificial
  CDR-H2 of G4H
RIRSKYNNYATYYADSVKG

SEQ ID NO: 464 - protein, 14 aa, Artificial
  CDR-H3 of G4H
HGNFGNSYLSYFAY

SEQ ID NO: 465 - protein, 5 aa, Artificial
  CDR-H1 of A2J
VYAMN

SEQ ID NO: 466 - protein, 19 aa, Artificial
  CDR-H2 of A2J
RIRSKYNNYATYYADSVKK

SEQ ID NO: 467 - protein, 14 aa, Artificial
  CDR-H3 of A2J
HGNFGNSYLSWWAY

SEQ ID NO: 468 - protein, 5 aa, Artificial
  CDR-H1 of E1L
KYAMN

SEQ ID NO: 469 - protein, 19 aa, Artificial
  CDR-H2 of E1L
RIRSKYNNYATYYADSVKS

SEQ ID NO: 470 - protein, 14 aa, Artificial
  CDR-H3 of E1L
HGNFGNSYTSYYAY

SEQ ID NO: 471 - protein, 5 aa, Artificial
  CDR-H1 of E2M
GYAMN

SEQ ID NO: 472 - protein, 19 aa, Artificial
  CDR-H2 of E2M
RIRSKYNNYATYYADSVKE

SEQ ID NO: 473 - protein, 14 aa, Artificial
  CDR-H3 of E2M
HRNFGNSYLSWFAY

SEQ ID NO: 474 - protein, 5 aa, Artificial
  CDR-H1 of F7O
VYAMN

SEQ ID NO: 475 - protein, 19 aa, Artificial
  CDR-H2 of F7O
RIRSKYNNYATYYADSVKK

SEQ ID NO: 476 - protein, 14 aa, Artificial
  CDR-H3 of F7O
HGNFGNSYISWWAY

SEQ ID NO: 477 - protein, 5 aa, Artificial
  CDR-H1 of F12Q
SYAMN

SEQ ID NO: 478 - protein, 19 aa, Artificial
  CDR-H2 of F12Q
RIRSKYNNYATYYADSVKG

SEQ ID NO: 479 - protein, 14 aa, Artificial
  CDR-H3 of F12Q
HGNFGNSYVSWWAY

SEQ ID NO: 480 - protein, 5 aa, Artificial
  CDR-H1 of I2C
KYAMN

SEQ ID NO: 481 - protein, 19 aa, Artificial
  CDR-H2 of I2C
RIRSKYNNYATYYADSVKD

SEQ ID NO: 482 - protein, 14 aa, Artificial
  CDR-H3 of I2C
HGNFGNSYISYWAY

SEQ ID NO: 483 - protein, 7 aa, Artificial
  CDR-L2 of H2C
GTKFLAP

SEQ ID NO: 484 - protein, 9 aa, Artificial
  CDR-L3 of H2C
ALWYSNRWV

SEQ ID NO: 485 - protein, 5 aa, Artificial
  CDR-H1 of H2C
KYAMN

SEQ ID NO: 486 - protein, 14 aa, Artificial
  CDR-L1 of H1E
GSSTGAVTSGYYPN

SEQ ID NO: 487 - protein, 7 aa, Artificial
  CDR-L2 of H1E
GTKFLAP

SEQ ID NO: 488 - protein, 9 aa, Artificial
  CDR-L3 of H1E
ALWYSNRWV

SEQ ID NO: 489 - protein, 5 aa, Artificial
  CDR-H1 of H1E
SYAMN

SEQ ID NO: 490 - protein, 19 aa, Artificial
  CDR-H2 of H1E
RIRSKYNNYATYYADSVKG

SEQ ID NO: 491 - protein, 14 aa, Artificial
  CDR-H3 of H1E
HGNFGNSYLSFWAY

SEQ ID NO: 492 - protein, 14 aa, Artificial
  CDR-L1 of G4H
GSSTGAVTSGYYPN

SEQ ID NO: 493 - protein, 7 aa, Artificial
  CDR-L2 of G4H
GTKFLAP

SEQ ID NO: 494 - protein, 9 aa, Artificial
  CDR-L3 of G4H
ALWYSNRWV

SEQ ID NO: 495 - protein, 14 aa, Artificial
  CDR-L1 of A2J
RSSTGAVTSGYYPN

SEQ ID NO: 496 - protein, 7 aa, Artificial
  CDR-L2 of A2J
ATDMRPS

SEQ ID NO: 497 - protein, 9 aa, Artificial
  CDR-L3 of A2J
ALWYSNRWV

SEQ ID NO: 498 - protein, 14 aa, Artificial
  CDR-L1 of E1L
GSSTGAVTSGYYPN

SEQ ID NO: 499 - protein, 7 aa, Artificial
  CDR-L2 of E1L
GTKFLAP

SEQ ID NO: 500 - protein, 9 aa, Artificial
  CDR-L3 of E1L
ALWYSNRWV

SEQ ID NO: 501 - protein, 14 aa, Artificial
  CDR-L1 of F7O
GSSTGAVTSGYYPN

SEQ ID NO: 502 - protein, 7 aa, Artificial
  CDR-L2 of F7O
GTKFLAP

SEQ ID NO: 503 - protein, 9 aa, Artificial
  CDR-L3 of F7O
ALWYSNRWV

SEQ ID NO: 504 - protein, 14 aa, Artificial
  CDR-L1 of I2C
GSSTGAVTSGNYPN

SEQ ID NO: 505 - protein, 7 aa, Artificial
  CDR-L2 of I2C
GTKFLAP

SEQ ID NO: 506 - protein, 9 aa, Artificial
  CDR-L3 of I2C
VLWYSNRWV

SEQ ID NO: 507 - protein, 109 aa, Artificial
  VL of H2C
QTVVTQEPSLTVSPGGTVTLTCGSSTGAVTSGYYPNWVQQKPGQAPRGLIGGTKFLAPGTPARFSGSLLGGKAALTLSGVQPEDEAEYYCALWYSNRWVFGGGTKLTVL

SEQ ID NO: 508 - protein, 109 aa, Artificial
  VL of E2M
QTVVTQEPSLTVSPGGTVTLTCRSSTGAVTSGYYPNWVQQKPGQAPRGLIGATDMRPSGTPARFSGSLLGGKAALTLSGVQPEDEAEYYCALWYSNRWVFGGGTKLTVL

SEQ ID NO: 509 - protein, 109 aa, Artificial
  VL of F12Q
QTVVTQEPSLTVSPGGTVTLTCGSSTGAVTSGNYPNWVQQKPGQAPRGLIGGTKFLAPGTPARFSGSLLGGKAALTLSGVQPEDEAEYYCVLWYSNRWVFGGGTKLTVL

SEQ ID NO: 510 - protein, 109 aa, Artificial
  VL variant of H2C
ELVVTQEPSLTVSPGGTVTLTCGSSTGAVTSGYYPNWVQQKPGQAPRGLIGGTKFLAPGTPARFSGSLLGGKAALTLSGVQPEDEAEYYCALWYSNRWVFGGGTKLTVL

SEQ ID NO: 511 - protein, 109 aa, Artificial
  VL variant of A2J
ELVVTQEPSLTVSPGGTVTLTCRSSTGAVTSGYYPNWVQQKPGQAPRGLIGATDMRPSGTPARFSGSLLGGKAALTLSGVQPEDEAEYYCALWYSNRWVFGGGTKLTVL

SEQ ID NO: 512 - protein, 109 aa, Artificial
  VL variant of F12Q
ELVVTQEPSLTVSPGGTVTLTCGSSTGAVTSGNYPNWVQQKPGQAPRGLIGGTKFLAPGTPARFSGSLLGGKAALTLSGVQPEDEAEYYCVLWYSNRWVFGGGTKLTVL

SEQ ID NO: 513 - protein, 125 aa, Artificial
  VH of F6A
EVQLVESGGGLVQPGGSLKLSCAASGFTFNIYAMNWVRQAPGKGLEWVARIRSKYNNYATYYADSVKSRFTISRDDSKNTAYLQMNNLKTEDTAVYYCVRHGNFGNSYVSFFAYWGQGTLVTVSS

SEQ ID NO: 514 - protein, 125 aa, Artificial
  VH of H2C
EVQLVESGGGLVQPGGSLKLSCAASGFTFNKYAMNWVRQAPGKGLEWVARIRSKYNNYATYYADSVKDRFTISRDDSKNTAYLQMNNLKTEDTAVYYCVRHGNFGNSYISYWAYWGQGTLVTVSS

SEQ ID NO: 515 - protein, 125 aa, Artificial
  VH of H1E
EVQLVESGGGLEQPGGSLKLSCAASGFTFNSYAMNWVRQAPGKGLEWVARIRSKYNNYATYYADSVKGRFTISRDDSKNTAYLQMNNLKTEDTAVYYCVRHGNFGNSYLSFWAYWGQGTLVTVSS

SEQ ID NO: 516 - protein, 125 aa, Artificial
  VH of G4H
EVQLVESGGGLVQPGGSLKLSCAASGFTFNRYAMNWVRQAPGKGLEWVARIRSKYNNYATYYADSVKGRFTISRDDSKNTAYLQMNNLKTEDTAVYYCVRHGNFGNSYLSYFAYWGQGTLVTVSS

SEQ ID NO: 517 - protein, 125 aa, Artificial
  VH of A2J
EVQLVESGGGLVQPGGSLKLSCAASGFTFNVYAMNWVRQAPGKGLEWVARIRSKYNNYATYYADSVKKRFTISRDDSKNTAYLQMNNLKTEDTAVYYCVRHGNFGNSYLSWWAYWGQGTLVTVSS

SEQ ID NO: 518 - protein, 125 aa, Artificial
  VH of E1L
EVQLVESGGGLVQPGGSLKLSCAASGFTFNKYAMNWVRQAPGKGLEWVARIRSKYNNYATYYADSVKSRFTISRDDSKNTAYLQMNNLKTEDTAVYYCVRHGNFGNSYTSYYAYWGQGTLVTVSS

SEQ ID NO: 519 - protein, 125 aa, Artificial
  VH of E2M
EVQLVESGGGLVQPGGSLKLSCAASGFTFNGYAMNWVRQAPGKGLEWVARIRSKYNNYATYYADSVKERFTISRDDSKNTAYLQMNNLKTEDTAVYYCVRHRNFGNSYLSWFAYWGQGTLVTVSS

SEQ ID NO: 520 - protein, 125 aa, Artificial
  VH of F7O
EVQLVESGGGLVQPGGSLKLSCAASGFTFNVYAMNWVRQAPGKGLEWVARIRSKYNNYATYYADSVKKRFTISRDDSKNTAYLQMNNLKTEDTAVYYCVRHGNFGNSYISWWAYWGQGTLVTVSS

SEQ ID NO: 521 - protein, 125 aa, Artificial
  VH of F12Q
EVQLVESGGGLVQPGGSLKLSCAASGFTFNSYAMNWVRQAPGKGLEWVARIRSKYNNYATYYADSVKGRFTISRDDSKNTAYLQMNNLKTEDTAVYYCVRHGNFGNSYVSWWAYWGQGTLVTVSS

SEQ ID NO: 522 - protein, 125 aa, Artificial; identical to SEQ ID NO: 514
  VH of I2C

SEQ ID NO: 523 - protein, 125 aa, Artificial
  VH of F12q
EVQLVESGGGLVQPGGSLRLSCAASGFTFNSYAMNWVRQAPGKGLEWVARIRSKYNNYATYYADSVKGRFTISRDDSKNTAYLQMNSLKTEDTAVYYCVRHGNFGNSYVSWWAYWGQGTLVTVSS

SEQ ID NO: 524 - protein, 125 aa, Artificial
  VH variant of F6A
EVQLLESGGGLVQPGGSLKLSCAASGFTFNIYAMNWVRQAPGKGLEWVARIRSKYNNYATYYADSVKSRFTISRDDSKNTAYLQMNNLKTEDTAVYYCVRHGNFGNSYVSFFAYWGQGTLVTVSS

SEQ ID NO: 525 - protein, 125 aa, Artificial
  VH variant of H2C
EVQLLESGGGLVQPGGSLKLSCAASGFTFNKYAMNWVRQAPGKGLEWVARIRSKYNNYATYYADSVKDRFTISRDDSKNTAYLQMNNLKTEDTAVYYCVRHGNFGNSYISYWAYWGQGTLVTVSS

SEQ ID NO: 526 - protein, 125 aa, Artificial
  VH variant of H1E
EVQLLESGGGLEQPGGSLKLSCAASGFTFNSYAMNWVRQAPGKGLEWVARIRSKYNNYATYYADSVKGRFTISRDDSKNTAYLQMNNLKTEDTAVYYCVRHGNFGNSYLSFWAYWGQGTLVTVSS

SEQ ID NO: 527 - protein, 125 aa, Artificial
  VH variant of G4H
EVQLLESGGGLVQPGGSLKLSCAASGFTFNRYAMNWVRQAPGKGLEWVARIRSKYNNYATYYADSVKGRFTISRDDSKNTAYLQMNNLKTEDTAVYYCVRHGNFGNSYLSYFAYWGQGTLVTVSS

SEQ ID NO: 528 - protein, 125 aa, Artificial
  VH variant of A2J
EVQLLESGGGLVQPGGSLKLSCAASGFTFNVYAMNWVRQAPGKGLEWVARIRSKYNNYATYYADSVKKRFTISRDDSKNTAYLQMNNLKTEDTAVYYCVRHGNFGNSYLSWWAYWGQGTLVTVSS

SEQ ID NO: 529 - protein, 125 aa, Artificial
  VH variant of E1L
EVQLLESGGGLVQPGGSLKLSCAASGFTFNKYAMNWVRQAPGKGLEWVARIRSKYNNYATYYADSVKSRFTISRDDSKNTAYLQMNNLKTEDTAVYYCVRHGNFGNSYTSYYAYWGQGTLVTVSS

SEQ ID NO: 530 - protein, 125 aa, Artificial
  VH variant of E2M
EVQLLESGGGLVQPGGSLKLSCAASGFTFNGYAMNWVRQAPGKGLEWVARIRSKYNNYATYYADSVKERFTISRDDSKNTAYLQMNNLKTEDTAVYYCVRHRNFGNSYLSWFAYWGQGTLVTVSS

SEQ ID NO: 531 - protein, 125 aa, Artificial
  VH variant of F7O
EVQLLESGGGLVQPGGSLKLSCAASGFTFNVYAMNWVRQAPGKGLEWVARIRSKYNNYATYYADSVKKRFTISRDDSKNTAYLQMNNLKTEDTAVYYCVRHGNFGNSYISWWAYWGQGTLVTVSS

SEQ ID NO: 532 - protein, 125 aa, Artificial
  VH variant of F12Q
EVQLLESGGGLVQPGGSLKLSCAASGFTFNSYAMNWVRQAPGKGLEWVARIRSKYNNYATYYADSVKGRFTISRDDSKNTAYLQMNNLKTEDTAVYYCVRHGNFGNSYVSWWAYWGQGTLVTVSS

SEQ ID NO: 533 - protein, 125 aa, Artificial; identical to SEQ ID NO: 525
  VH variant of I2C

SEQ ID NO: 534 - protein, 109 aa, Artificial; identical to SEQ ID NO: 507
  VL of F6A

SEQ ID NO: 535 - protein, 109 aa, Artificial; identical to SEQ ID NO: 507
  VL of H1E

SEQ ID NO: 536 - protein, 109 aa, Artificial; identical to SEQ ID NO: 507
  VL of G4H

SEQ ID NO: 537 - protein, 109 aa, Artificial; identical to SEQ ID NO: 508
  VL of A2J

SEQ ID NO: 538 - protein, 109 aa, Artificial; identical to SEQ ID NO: 507
  VL of E1L

SEQ ID NO: 539 - protein, 109 aa, Artificial; identical to SEQ ID NO: 507
  VL of F7O

SEQ ID NO: 540 - protein, 109 aa, Artificial; identical to SEQ ID NO: 509
  VL of I2C

SEQ ID NO: 541 - protein, 109 aa, Artificial; identical to SEQ ID NO: 509
  VL of F12q

SEQ ID NO: 542 - protein, 249 aa, Artificial
  scFv of F6A
EVQLVESGGGLVQPGGSLKLSCAASGFTFNIYAMNWVRQAPGKGLEWVARIRSKYNNYATYYADSVKSRFTISRDDSKNTAYLQMNNLKTEDTAVYYCVRHGNFGNSYVSFFAYWGQGTLVTVSSGGGGSGGGGSGGGGSQTVVTQEPSLTVSPGGTVTLTCGSSTGAVTSGYYPNWVQQKPGQAPRGLIGGTKFLAPGTPARFSGSLLGGKAALTLSGVQPEDEAEYYCALWYSNRWVFGGGTKLTVL

SEQ ID NO: 543 - protein, 249 aa, Artificial
  scFv of H2C
EVQLVESGGGLVQPGGSLKLSCAASGFTFNKYAMNWVRQAPGKGLEWVARIRSKYNNYATYYADSVKDRFTISRDDSKNTAYLQMNNLKTEDTAVYYCVRHGNFGNSYISYWAYWGQGTLVTVSSGGGGSGGGGSGGGGSQTVVTQEPSLTVSPGGTVTLTCGSSTGAVTSGYYPNWVQQKPGQAPRGLIGGTKFLAPGTPARFSGSLLGGKAALTLSGVQPEDEAEYYCALWYSNRWVFGGGTKLTVL

SEQ ID NO: 544 - protein, 249 aa, Artificial
  scFv of H1E
EVQLVESGGGLEQPGGSLKLSCAASGFTFNSYAMNWVRQAPGKGLEWVARIRSKYNNYATYYADSVKGRFTISRDDSKNTAYLQMNNLKTEDTAVYYCVRHGNFGNSYLSFWAYWGQGTLVTVSSGGGGSGGGGSGGGGSQTVVTQEPSLTVSPGGTVTLTCGSSTGAVTSGYYPNWVQQKPGQAPRGLIGGTKFLAPGTPARFSGSLLGGKAALTLSGVQPEDEAEYYCALWYSNRWVFGGGTKLTVL

SEQ ID NO: 545 - protein, 249 aa, Artificial
  scFv of G4H
EVQLVESGGGLVQPGGSLKLSCAASGFTFNRYAMNWVRQAPGKGLEWVARIRSKYNNYATYYADSVKGRFTISRDDSKNTAYLQMNNLKTEDTAVYYCVRHGNFGNSYLSYFAYWGQGTLVTVSSGGGGSGGGGSGGGGSQTVVTQEPSLTVSPGGTVTLTCGSSTGAVTSGYYPNWVQQKPGQAPRGLIGGTKFLAPGTPARFSGSLLGGKAALTLSGVQPEDEAEYYCALWYSNRWVFGGGTKLTVL

SEQ ID NO: 546 - protein, 249 aa, Artificial
  scFv of A2J
EVQLVESGGGLVQPGGSLKLSCAASGFTFNVYAMNWVRQAPGKGLEWVARIRSKYNNYATYYADSVKKRFTISRDDSKNTAYLQMNNLKTEDTAVYYCVRHGNFGNSYLSWWAYWGQGTLVTVSSGGGGSGGGGSGGGGSQTVVTQEPSLTVSPGGTVTLTCRSSTGAVTSGYYPNWVQQKPGQAPRGLIGATDMRPSGTPARFSGSLLGGKAALTLSGVQPEDEAEYYCALWYSNRWVFGGGTKLTVL

SEQ ID NO: 547 - protein, 249 aa, Artificial
  scFv of E1L
EVQLVESGGGLVQPGGSLKLSCAASGFTFNKYAMNWVRQAPGKGLEWVARIRSKYNNYATYYADSVKSRFTISRDDSKNTAYLQMNNLKTEDTAVYYCVRHGNFGNSYTSYYAYWGQGTLVTVSSGGGGSGGGGSGGGGSQTVVTQEPSLTVSPGGTVTLTCGSSTGAVTSGYYPNWVQQKPGQAPRGLIGGTKFLAPGTPARFSGSLLGGKAALTLSGVQPEDEAEYYCALWYSNRWVFGGGTKLTVL

SEQ ID NO: 548 - protein, 249 aa, Artificial
  scFv of E2M
EVQLVESGGGLVQPGGSLKLSCAASGFTFNGYAMNWVRQAPGKGLEWVARIRSKYNNYATYYADSVKERFTISRDDSKNTAYLQMNNLKTEDTAVYYCVRHRNFGNSYLSWFAYWGQGTLVTVSSGGGGSGGGGSGGGGSQTVVTQEPSLTVSPGGTVTLTCRSSTGAVTSGYYPNWVQQKPGQAPRGLIGATDMRPSGTPARFSGSLLGGKAALTLSGVQPEDEAEYYCALWYSNRWVFGGGTKLTVL

SEQ ID NO: 549 - protein, 249 aa, Artificial
  scFv of F7O
EVQLVESGGGLVQPGGSLKLSCAASGFTFNVYAMNWVRQAPGKGLEWVARIRSKYNNYATYYADSVKKRFTISRDDSKNTAYLQMNNLKTEDTAVYYCVRHGNFGNSYISWWAYWGQGTLVTVSSGGGGSGGGGSGGGGSQTVVTQEPSLTVSPGGTVTLTCGSSTGAVTSGYYPNWVQQKPGQAPRGLIGGTKFLAPGTPARFSGSLLGGKAALTLSGVQPEDEAEYYCALWYSNRWVFGGGTKLTVL

SEQ ID NO: 550 - protein, 249 aa, Artificial
  scFv of F12Q
EVQLVESGGGLVQPGGSLKLSCAASGFTFNSYAMNWVRQAPGKGLEWVARIRSKYNNYATYYADSVKGRFTISRDDSKNTAYLQMNNLKTEDTAVYYCVRHGNFGNSYVSWWAYWGQGTLVTVSSGGGGSGGGGSGGGGSQTVVTQEPSLTVSPGGTVTLTCGSSTGAVTSGNYPNWVQQKPGQAPRGLIGGTKFLAPGTPARFSGSLLGGKAALTLSGVQPEDEAEYYCVLWYSNRWVFGGGTKLTVL

SEQ ID NO: 551 - protein, 249 aa, Artificial
  scFv of I2C
EVQLVESGGGLVQPGGSLKLSCAASGFTFNKYAMNWVRQAPGKGLEWVARIRSKYNNYATYYADSVKDRFTISRDDSKNTAYLQMNNLKTEDTAVYYCVRHGNFGNSYISYWAYWGQGTLVTVSSGGGGSGGGGSGGGGSQTVVTQEPSLTVSPGGTVTLTCGSSTGAVTSGNYPNWVQQKPGQAPRGLIGGTKFLAPGTPARFSGSLLGGKAALTLSGVQPEDEAEYYCVLWYSNRWVFGGGTKLTVL

SEQ ID NO: 552 - protein, 249 aa, Artificial
  scFv of F12q
EVQLVESGGGLVQPGGSLRLSCAASGFTFNSYAMNWVRQAPGKGLEWVARIRSKYNNYATYYADSVKGRFTISRDDSKNTAYLQMNSLKTEDTAVYYCVRHGNFGNSYVSWWAYWGQGTLVTVSSGGGGSGGGGSGGGGSQTVVTQEPSLTVSPGGTVTLTCGSSTGAVTSGNYPNWVQQKPGQAPRGLIGGTKFLAPGTPARFSGSLLGGKAALTLSGVQPEDEAEYYCVLWYSNRWVFGGGTKLTVL

SEQ ID NO: 553 - protein, 249 aa, Artificial
  scFv variant of F6A
EVQLLESGGGLVQPGGSLKLSCAASGFTFNIYAMNWVRQAPGKGLEWVARIRSKYNNYATYYADSVKSRFTISRDDSKNTAYLQMNNLKTEDTAVYYCVRHGNFGNSYVSFFAYWGQGTLVTVSSGGGGSGGGGSGGGGSELVVTQEPSLTVSPGGTVTLTCGSSTGAVTSGYYPNWVQQKPGQAPRGLIGGTKFLAPGTPARFSGSLLGGKAALTLSGVQPEDEAEYYCALWYSNRWVFGGGTKLTVL

SEQ ID NO: 554 - protein, 249 aa, Artificial
  scFv variant of H2C
EVQLLESGGGLVQPGGSLKLSCAASGFTFNKYAMNWVRQAPGKGLEWVARIRSKYNNYATYYADSVKDRFTISRDDSKNTAYLQMNNLKTEDTAVYYCVRHGNFGNSYISYWAYWGQGTLVTVSSGGGGSGGGGSGGGGSELVVTQEPSLTVSPGGTVTLTCGSSTGAVTSGYYPNWVQQKPGQAPRGLIGGTKFLAPGTPARFSGSLLGGKAALTLSGVQPEDEAEYYCALWYSNRWVFGGGTKLTVL

SEQ ID NO: 555 - protein, 249 aa, Artificial
  scFv variant of H1E
EVQLLESGGGLEQPGGSLKLSCAASGFTFNSYAMNWVRQAPGKGLEWVARIRSKYNNYATYYADSVKGRFTISRDDSKNTAYLQMNNLKTEDTAVYYCVRHGNFGNSYLSFWAYWGQGTLVTVSSGGGGSGGGGSGGGGSELVVTQEPSLTVSPGGTVTLTCGSSTGAVTSGYYPNWVQQKPGQAPRGLIGGTKFLAPGTPARFSGSLLGGKAALTLSGVQPEDEAEYYCALWYSNRWVFGGGTKLTVL

SEQ ID NO: 556 - protein, 249 aa, Artificial
  scFv variant of G4H
EVQLLESGGGLVQPGGSLKLSCAASGFTFNRYAMNWVRQAPGKGLEWVARIRSKYNNYATYYADSVKGRFTISRDDSKNTAYLQMNNLKTEDTAVYYCVRHGNFGNSYLSYFAYWGQGTLVTVSSGGGGSGGGGSGGGGSELVVTQEPSLTVSPGGTVTLTCGSSTGAVTSGYYPNWVQQKPGQAPRGLIGGTKFLAPGTPARFSGSLLGGKAALTLSGVQPEDEAEYYCALWYSNRWVFGGGTKLTVL

SEQ ID NO: 557 - protein, 249 aa, Artificial
  scFv variant of A2J
EVQLLESGGGLVQPGGSLKLSCAASGFTFNVYAMNWVRQAPGKGLEWVARIRSKYNNYATYYADSVKKRFTISRDDSKNTAYLQMNNLKTEDTAVYYCVRHGNFGNSYLSWWAYWGQGTLVTVSSGGGGSGGGGSGGGGSELVVTQEPSLTVSPGGTVTLTCRSSTGAVTSGYYPNWVQQKPGQAPRGLIGATDMRPSGTPARFSGSLLGGKAALTLSGVQPEDEAEYYCALWYSNRWVFGGGTKLTVL

SEQ ID NO: 558 - protein, 249 aa, Artificial
  scFv variant of E1L
EVQLLESGGGLVQPGGSLKLSCAASGFTFNKYAMNWVRQAPGKGLEWVARIRSKYNNYATYYADSVKSRFTISRDDSKNTAYLQMNNLKTEDTAVYYCVRHGNFGNSYTSYYAYWGQGTLVTVSSGGGGSGGGGSGGGGSELVVTQEPSLTVSPGGTVTLTCGSSTGAVTSGYYPNWVQQKPGQAPRGLIGGTKFLAPGTPARFSGSLLGGKAALTLSGVQPEDEAEYYCALWYSNRWVFGGGTKLTVL

SEQ ID NO: 559 - protein, 249 aa, Artificial
  scFv variant of E2M
EVQLLESGGGLVQPGGSLKLSCAASGFTFNGYAMNWVRQAPGKGLEWVARIRSKYNNYATYYADSVKERFTISRDDSKNTAYLQMNNLKTEDTAVYYCVRHRNFGNSYLSWFAYWGQGTLVTVSSGGGGSGGGGSGGGGSELVVTQEPSLTVSPGGTVTLTCRSSTGAVTSGYYPNWVQQKPGQAPRGLIGATDMRPSGTPARFSGSLLGGKAALTLSGVQPEDEAEYYCALWYSNRWVFGGGTKLTVL

SEQ ID NO: 560 - protein, 249 aa, Artificial
  scFv variant of F7O
EVQLLESGGGLVQPGGSLKLSCAASGFTFNVYAMNWVRQAPGKGLEWVARIRSKYNNYATYYADSVKKRFTISRDDSKNTAYLQMNNLKTEDTAVYYCVRHGNFGNSYISWWAYWGQGTLVTVSSGGGGSGGGGSGGGGSELVVTQEPSLTVSPGGTVTLTCGSSTGAVTSGYYPNWVQQKPGQAPRGLIGGTKFLAPGTPARFSGSLLGGKAALTLSGVQPEDEAEYYCALWYSNRWVFGGGTKLTVL

SEQ ID NO: 561 - protein, 249 aa, Artificial
  scFv variant of F12Q
EVQLLESGGGLVQPGGSLKLSCAASGFTFNSYAMNWVRQAPGKGLEWVARIRSKYNNYATYYADSVKGRFTISRDDSKNTAYLQMNNLKTEDTAVYYCVRHGNFGNSYVSWWAYWGQGTLVTVSSGGGGSGGGGSGGGGSELVVTQEPSLTVSPGGTVTLTCGSSTGAVTSGNYPNWVQQKPGQAPRGLIGGTKFLAPGTPARFSGSLLGGKAALTLSGVQPEDEAEYYCVLWYSNRWVFGGGTKLTVL

SEQ ID NO: 562 - protein, 249 aa, Artificial
  scFv variant of I2C
EVQLLESGGGLVQPGGSLKLSCAASGFTFNKYAMNWVRQAPGKGLEWVARIRSKYNNYATYYADSVKDRFTISRDDSKNTAYLQMNNLKTEDTAVYYCVRHGNFGNSYISYWAYWGQGTLVTVSSGGGGSGGGGSGGGGSELVVTQEPSLTVSPGGTVTLTCGSSTGAVTSGNYPNWVQQKPGQAPRGLIGGTKFLAPGTPARFSGSLLGGKAALTLSGVQPEDEAEYYCVLWYSNRWVFGGGTKLTVL

SEQ ID NO: 563 - protein, 5 aa, Artificial
  linker 2
GGGGS

SEQ ID NO: 564 - protein, 5 aa, Artificial
  linker 3
GGGGQ

SEQ ID NO: 565 - protein, 6 aa, Artificial
  linker 4
SGGGGS

SEQ ID NO: 566 - protein, 6 aa, Artificial
  linker 5
PGGGGS

SEQ ID NO: 567 - protein, 6 aa, Artificial
  linker 6
PGGDGS

SEQ ID NO: 568 - protein, 9 aa, Artificial
  linker 7
GGGGSGGGS

SEQ ID NO: 569 - protein, 10 aa, Artificial
  linker 8 = (G4S)2 linker
GGGGSGGGGS

SEQ ID NO: 570 - protein, 15 aa, Artificial
  linker 9 = (G4S)3 linker
GGGGSGGGGSGGGGS

SEQ ID NO: 571 - protein, 20 aa, Artificial
  (G4S)4 linker
GGGGSGGGGSGGGGSGGGGS

SEQ ID NO: 572 - protein, 25 aa, Artificial
  (G4S)5 linker
GGGGSGGGGSGGGGSGGGGSGGGGS

SEQ ID NO: 573 - protein, 30 aa, Artificial
  (G4S)6 linker
GGGGSGGGGSGGGGSGGGGSGGGGSGGGGS

SEQ ID NO: 574 - protein, 35 aa, Artificial
  (G4S)7 linker
GGGGSGGGGSGGGGSGGGGSGGGGSGGGGSGGGGS

SEQ ID NO: 575 - protein, 40 aa, Artificial
  (G4S)8 linker
GGGGSGGGGSGGGGSGGGGSGGGGSGGGGSGGGGSGGGGS

SEQ ID NO: 576 - protein, 16 aa, Artificial
  linear FcRn BP
  misc_feature (12)..(12): Xaa can be any naturally occurring amino acid
QRFVTGHFGGLXPANG

SEQ ID NO: 577 - protein, 16 aa, Artificial
  linear FcRn BP-Y
QRFVTGHFGGLYPANG

SEQ ID NO: 578 - protein, 16 aa, Artificial
  linear FcRn BP-H
QRFVTGHFGGLHPANG

SEQ ID NO: 579 - protein, 9 aa, Artificial
  core FcRn BP-H
TGHFGGLHP

SEQ ID NO: 580 - protein, 16 aa, Artificial
  cyclic FcRn BP-H
QRFCTGHFGGLHPCNG

SEQ ID NO: 581 - protein, 585 aa, Artificial [sequence omitted]

SEQ ID NO: 582 - protein, 585 aa, Artificial
  HALB variant 1
DAHKSEVAHRFKDLGEENFKALVLIAFAQYLQQCPFEDHVKLVNEVTEFAKTCVADESAENCDKSLHTLFGDKLCTVATLRETYGEMADCCAKQEPERNECFLQHKDDNPNLPRLVRPEVDVMCTAFHDNEETFLKKYLYEIARRHPYFYAPELLFFAKRYKAAFTECCQAADKAACLLPKLDELRDEGKASSAKQRLKCASLQKFGERAFKAWAVARLSQRFPKAEFAEVSKLVTDLTKVHTECCHGDLLECADDRADLAKYICENQDSISSKLKECCEKPLLEKSHCIAEVENDEMPADLPSLAADFVESKDVCKNYAEAKDVFLGMFLYEYARRHPDYSVVLLLRLAKTYETTLEKCCAAADPHECYAKVFDEFKPLVEEPQNLIKQNCELFEQLGEYKFQNALLVRYTKKVPQVSTPTLVEVSRNLGKVGSKCCKHPEAKRMPCAEDYLSVVLNQLCVLHEKTPVSDRVTKCCTESLVNRRPCFSALEVDETYVPKEFNAGTFTFHADICTLSEKERQIKKQTALVELVKHKPKATKEQLKAAMDDFAAFVEKCCKADDKETCFAEEGKKLVAASQAALGL

SEQ ID NO: 583 - protein, 585 aa, Artificial
  HALB variant 2
DAHKSEVAHRFKDLGEENFKALVLIAFAQYLQQCPFEDHVKLVNEVTEFAKTCVADESAENCDKSLHTLFGDKLCTVATLRETYGEMADCCAKQEPERNECFLQHKDDNPNLPRLVRPEVDVMCTAFHDNEETFLKKYLYEIARRHPYFYAPELLFFAKRYKAAFTECCQAADKAACLLPKLDELRDEGKASSAKQRLKCASLQKFGERAFKAWAVARLSQRFPKAEFAEVSKLVTDLTKVHTECCHGDLLECADDRADLAKYICENQDSISSKLKECCEKPLLEKSHCIAEVENDEMPADLPSLAADFVESKDVCKNYAEAKDVFLGMFLYEYARRHPDYSVVLLLRLAKTYETTLEKCCAAADPHECYAKVFDEFKPLVEEPQNLIKQNCELFEQLGEYKFQNALLVRYTKKVPQVSTPTLVEVSRNLGKVGSKCCKHPEAKRMPCAEDYLSVVLNQLCVLHEKTPVSDRVTKCCTESLVNRRPCFSALEVDETYVPKEFNAETFTFHADICTLSEKERQIKKQTALVELVKHKPKATKEQLKAVMDDFAAFVEKCCKADDKETCFAEEGPKLVAASQAALGL

SEQ ID NO: 584 - protein, 585 aa, Artificial
  HALB variant 3
DAHKSEVAHRFKDLGEENFKALVLIAFAQYLQQCPFEDHVKLVNEVTEFAKTCVADESAENCDKSLHTLFGDKLCTVATLRETYGEMADCCAKQEPERNECFLQHKDDNPNLPRLVRPEVDVMCTAFHDNEETFLKKYLYEIARRHPYFYAPELLFFAKRYKAAFTECCQAADKAACLLPKLDELRDEGKASSAKQRLKCASLQKFGERAFKAWAVARLSQRFPKAEFAEVSKLVTDLTKVHTECCHGDLLECADDRADLAKYICENQDSISSKLKECCEKPLLEKSHCIAEVENDEMPADLPSLAADFVESKDVCKNYAEAKDVFLGMFLYEYARRHPDYSVVLLLRLAKTYETTLEKCCAAADPHECYAKVFDEFKPLVEEPQNLIKQNCELFEQLGEYKFQNALLVRYTKKVPQVSTPTLVEVSRNLGKVGSKCCKHPEAKRMPCAEDYLSVVLNQLCVLHEKTPVSDRVTKCCTESLVNRRPCFSALDVDETYVPKEFNAETFTFHADICTLSEKERQIKKQTALVELVKHKPKATKEQLKAVMDDFAAFVEKCCKADDKETCFAEEGPHLVAASKAALGL

SEQ ID NO: 585 - protein, 585 aa, Artificial
  HALB variant 4
DAHKSEVAHRFKDLGEENFKALVLIAFAQYLQQCPFEDHVKLVNEVTEFAKTCVADESAENCDKSLHTLFGDKLCTVATLRETYGEMADCCAKQEPERNECFLQHKDDNPNLPRLVRPEVDVMCTAFHDNEETFLKKYLYEIARRHPYFYAPELLFFAKRYKAAFTECCQAADKAACLLPKLDELRDEGKASSAKQRLKCASLQKFGERAFKAWAVARLSQRFPKAEFAEVSKLVTDLTKVHTECCHGDLLECADDRADLAKYICENQDSISSKLKECCEKPLLEKSHCIAEVENDEMPADLPSLAADFVESKDVCKNYAEAKDVFLGMFLYEYARRHPDYSVVLLLRLAKTYETTLEKCCAAADPHECYAKVFDEFKPLVEEPQNLIKQNCELFEQLGEYKFQNALLVRYTKKVPQVSTPTLVEVSRNLGKVGSKCCKHPEAKRMPCAEDYLSVVLNQLCVLHEKTPVSDRVTKCCTESLVNRRPCFSALGVDETYVPKEFNAETFTFHADICTLSEKERQIKKQTALVELVKHKPKATKEQLKAVMDKFAAFVEKCCKADDKETCFAEEGPKLVAASQAALGL

SEQ ID NO: 586 - protein, 585 aa, Artificial
  HALB variant 5
DAHKSEVAHRFKDLGEENFKALVLIAFAQYLQQCPFEDHVKLVNEVTEFAKTCVADESAENCDKSLHTLFGDKLCTVATLRETYGEMADCCAKQEPERNECFLQHKDDNPNLPRLVRPEVDVMCTAFHDNEETFLKKYLYEIARRHPYFYAPELLFFAKRYKAAFTECCQAADKAACLLPKLDELRDEGKASSAKQRLKCASLQKFGERAFKAWAVARLSQRFPKAEFAEVSKLVTDLTKVHTECCHGDLLECADDRADLAKYICENQDSISSKLKECCEKPLLEKSHCIAEVENDEMPADLPSLAADFVESKDVCKNYAEAKDVFLGMFLYEYARRHPDYSVVLLLRLAKTYETTLEKCCAAADPHECYAKVFDEFKPLVEEPQNLIKQNCELFEQLGEYKFQNALLVRYTKKVPQVSTPTLVEVSRNLGKVGSKCCKHPEAKRMPCAEDYLSVVLNQLCVLHEKTPVSDRVTKCCTESLVNRRPCFSALDVDETYVPKEFNAETFTFHADICTLSEKERQIKKQTALVELVKHKPKATKEQLKAVMDKFAAFVEKCCKADDKETCFAEEGPKLVAASQAALGL

SEQ ID NO: 587 - protein, 585 aa, Artificial
  HALB variant 6
DAHKSEVAHRFKDLGEENFKALVLIAFAQYLQQCPFEDHVKLVNEVTEFAKTCVADESAENCDKSLHTLFGDKLCTVATLRETYGEMADCCAKQEPERNECFLQHKDDNPNLPRLVRPEVDVMCTAFHDNEETFLKKYLYEIARRHPYFYAPELLFFAKRYKAAFTECCQAADKAACLLPKLDELRDEGKASSAKQRLKCASLQKFGERAFKAWAVARLSQRFPKAEFAEVSKLVTDLTKVHTECCHGDLLECADDRADLAKYICENQDSISSKLKECCEKPLLEKSHCIAEVENDEMPADLPSLAADFVESKDVCKNYAEAKDVFLGMFLYEYARRHPDYSVVLLLRLAKTYETTLEKCCAAADPHECYAKVFDEFKPLVEEPQNLIKQNCELFEQLGEYKFQNALLVRYTKKVPQVSTPTLVEVSRNLGKVGSKCCKHPEAKRMPCAEDYLSVVLNQLCVLHEKTPVSDRVTKCCTESLVNRRPCFSALEVDETYVPKEFNAETFTFHADICTLSEKERQIKKQTALVELVKHKPKATKEQLKAVMDKFAAFVEKCCKADDKETCFAEEGPHLVAASQAALGL

SEQ ID NO: 588 - protein, 585 aa, Artificial
  HALB variant 7
DAHKSEVAHRFKDLGEENFKALVLIAFAQYLQQCPFEDHVKLVNEVTEFAKTCVADESAENCDKSLHTLFGDKLCTVATLRETYGEMADCCAKQEPERNECFLQHKDDNPNLPRLVRPEVDVMCTAFHDNEETFLKKYLYEIARRHPYFYAPELLFFAKRYKAAFTECCQAADKAACLLPKLDELRDEGKASSAKQRLKCASLQKFGERAFKAWAVARLSQRFPKAEFAEVSKLVTDLTKVHTECCHGDLLECADDRADLAKYICENQDSISSKLKECCEKPLLEKSHCIAEVENDEMPADLPSLAADFVESKDVCKNYAEAKDVFLGMFLYEYARRHPDYSVVLLLRLAKTYETTLEKCCAAADPHECYAKVFDEFKPLVEEPQNLIKQNCELFEQLGEYKFQNALLVRYTKKVPQVSTPTLVEVSRNLGKVGSKCCKHPEAKRMPCAEDYLSVVLNQLCVLHEKTPVSDRVTKCCTESLVNRRPCFSALEVDETYVPKEFNAETFTFHADICTLSEKERQIKKQTALVELVKHKPKATKEQLKAVMDDFAAFVEKCCKADDKETCFAEEGPHLVAASKAALGL

SEQ ID NO: 589 - protein, 585 aa, Artificial
  HALB variant 8
DAHKSEVAHRFKDLGEENFKALVLIAFAQYLQQCPFEDHVKLVNEVTEFAKTCVADESAENCDKSLHTLFGDKLCTVATLRETYGEMADCCAKQEPERNECFLQHKDDNPNLPRLVRPEVDVMCTAFHDNEETFLKKYLYEIARRHPYFYAPELLFFAKRYKAAFTECCQAADKAACLLPKLDELRDEGKASSAKQRLKCASLQKFGERAFKAWAVARLSQRFPKAEFAEVSKLVTDLTKVHTECCHGDLLECADDRADLAKYICENQDSISSKLKECCEKPLLEKSHCIAEVENDEMPADLPSLAADFVESKDVCKNYAEAKDVFLGMFLYEYARRHPDYSVVLLLRLAKTYETTLEKCCAAADPHECYAKVFDEFKPLVEEPQNLIKQNCELFEQLGEYKFQNALLVRYTKKVPQVSTPTLVEVSRNLGKVGSKCCKHPEAKRMPCAEDYLSVVLNQLCVLHEKTPVSDRVTKCCTESLVNRRPCFSALEVDETYVPKEFNAETFTFHADICTLSEKERQIKKQTALVELVKHKPKATKEQLKAVMDKFAAFVEKCCKADDKETCFAEEGPKLVAASKAALGL

SEQ ID NO: 590 - protein, 585 aa, Artificial
  HALB variant 9
DAHKSEVAHRFKDLGEENFKALVLIAFAQYLQQCPFEDHVKLVNEVTEFAKTCVADESAENCDKSLHTLFGDKLCTVATLRETYGEMADCCAKQEPERNECFLQHKDDNPNLPRLVRPEVDVMCTAFHDNEETFLKKYLYEIARRHPYFYAPELLFFAKRYKAAFTECCQAADKAACLLPKLDELRDEGKASSAKQRLKCASLQKFGERAFKAWAVARLSQRFPKAEFAEVSKLVTDLTKVHTECCHGDLLECADDRADLAKYICENQDSISSKLKECCEKPLLEKSHCIAEVENDEMPADLPSLAADFVESKDVCKNYAEAKDVFLGMFLYEYARRHPDYSVVLLLRLAKTYETTLEKCCAAADPHECYAKVFDEFKPLVEEPQNLIKQNCELFEQLGEYKFQNALLVRYTKKVPQVSTPTLVEVSRNLGKVGSKCCKHPEAKRMPCAEDYLSVVLNQLCVLHEKTPVSDRVTKCCTESLVNRRPCFSALDVDETYVPKEFNAETFTFHADICTLSEKERQIKKQTALVELVKHKPKATKEQLKAVMDDFAAFVEKCCKADDKETCFAEEGPKLVAASKAALGL

SEQ ID NO: 591 - protein, 585 aa, Artificial
  HALB variant 10
DAHKSEVAHRFKDLGEENFKALVLIAFAQYLQQSPFEDHVKLVNEVTEFAKTCVADESAENCDKSLHTLFGDKLCTVATLRETYGEMADCCAKQEPERNECFLQHKDDNPNLPRLVRPEVDVMCTAFHDNEETFLKKYLYEIARRHPYFYAPELLFFAKRYKAAFTECCQAADKAACLLPKLDELRDEGKASSAKQRLKCASLQKFGERAFKAWAVARLSQRFPKAEFAEVSKLVTDLTKVHTECCHGDLLECADDRADLAKYICENQDSISSKLKECCEKPLLEKSHCIAEVENDEMPADLPSLAADFVESKDVCKNYAEAKDVFLGMFLYEYARRHPDYSVVLLLRLAKTYETTLEKCCAAADPHECYAKVFDEFKPLVEEPQNLIKQNCELFEQLGEYKFQNALLVRYTKKVPQVSTPTLVEVSRNLGKVGSKCCKHPEAKRMPCAEDYLSVVLNQLCVLHEKTPVSDRVTKCCTESLVNRRPCFSALEVDETYVPKEFNAETFTFHADICTLSEKERQIKKQTALVELVKHKPKATKEQLKAVMDDFAAFVEKCCKADDKETCFAEEGKKLVAASQAALGL

SEQ ID NO: 592 - protein, 585 aa, Artificial
  HALB variant 11
DAHKSEVAHRFKDLGEENFKALVLIAFAQYLQQSPFEDHVKLVNEVTEFAKTCVADESAENCDKSLHTLFGDKLCTVATLRETYGEMADCCAKQEPERNECFLQHKDDNPNLPRLVRPEVDVMCTAFHDNEETFLKKYLYEIARRHPYFYAPELLFFAKRYKAAFTECCQAADKAACLLPKLDELRDEGKASSAKQRLKCASLQKFGERAFKAWAVARLSQRFPKAEFAEVSKLVTDLTKVHTECCHGDLLECADDRADLAKYICENQDSISSKLKECCEKPLLEKSHCIAEVENDEMPADLPSLAADFVESKDVCKNYAEAKDVFLGMFLYEYARRHPDYSVVLLLRLAKTYETTLEKCCAAADPHECYAKVFDEFKPLVEEPQNLIKQNCELFEQLGEYKFQNALLVRYTKKVPQVSTPTLVEVSRNLGKVGSKCCKHPEAKRMPCAEDYLSVVLNQLCVLHEKTPVSDRVTKCCTESLVNRRPCFSALEVDETYVPKEFNAGTFTFHADICTLSEKERQIKKQTALVELVKHKPKATKEQLKAAMDDFAAFVEKCCKADDKETCFAEEGKKLVAASQAALGL

SEQ ID NO: 593 - protein, 585 aa, Artificial
  HALB variant 12
DAHKSEVAHRFKDLGEENFKALVLIAFAQYLQQSPFEDHVKLVNEVTEFAKTCVADESAENCDKSLHTLFGDKLCTVATLRETYGEMADCCAKQEPERNECFLQHKDDNPNLPRLVRPEVDVMCTAFHDNEETFLKKYLYEIARRHPYFYAPELLFFAKRYKAAFTECCQAADKAACLLPKLDELRDEGKASSAKQRLKCASLQKFGERAFKAWAVARLSQRFPKAEFAEVSKLVTDLTKVHTECCHGDLLECADDRADLAKYICENQDSISSKLKECCEKPLLEKSHCIAEVENDEMPADLPSLAADFVESKDVCKNYAEAKDVFLGMFLYEYARRHPDYSVVLLLRLAKTYETTLEKCCAAADPHECYAKVFDEFKPLVEEPQNLIKQNCELFEQLGEYKFQNALLVRYTKKVPQVSTPTLVEVSRNLGKVGSKCCKHPEAKRMPCAEDYLSVVLNQLCVLHEKTPVSDRVTKCCTESLVNRRPCFSALEVDETYVPKEFNAETFTFHADICTLSEKERQIKKQTALVELVKHKPKATKEQLKAVMDDFAAFVEKCCKADDKETCFAEEGPKLVAASQAALGL

SEQ ID NO: 594 - protein, 585 aa, Artificial
  HALB variant 13
DAHKSEVAHRFKDLGEENFKALVLIAFAQYLQQSPFEDHVKLVNEVTEFAKTCVADESAENCDKSLHTLFGDKLCTVATLRETYGEMADCCAKQEPERNECFLQHKDDNPNLPRLVRPEVDVMCTAFHDNEETFLKKYLYEIARRHPYFYAPELLFFAKRYKAAFTECCQAADKAACLLPKLDELRDEGKASSAKQRLKCASLQKFGERAFKAWAVARLSQRFPKAEFAEVSKLVTDLTKVHTECCHGDLLECADDRADLAKYICENQDSISSKLKECCEKPLLEKSHCIAEVENDEMPADLPSLAADFVESKDVCKNYAEAKDVFLGMFLYEYARRHPDYSVVLLLRLAKTYETTLEKCCAAADPHECYAKVFDEFKPLVEEPQNLIKQNCELFEQLGEYKFQNALLVRYTKKVPQVSTPTLVEVSRNLGKVGSKCCKHPEAKRMPCAEDYLSVVLNQLCVLHEKTPVSDRVTKCCTESLVNRRPCFSALDVDETYVPKEFNAETFTFHADICTLSEKERQIKKQTALVELVKHKPKATKEQLKAVMDDFAAFVEKCCKADDKETCFAEEGPHLVAASKAALGL

SEQ ID NO: 595 - protein, 585 aa, Artificial
  HALB variant 14
DAHKSEVAHRFKDLGEENFKALVLIAFAQYLQQSPFEDHVKLVNEVTEFAKTCVADESAENCDKSLHTLFGDKLCTVATLRETYGEMADCCAKQEPERNECFLQHKDDNPNLPRLVRPEVDVMCTAFHDNEETFLKKYLYEIARRHPYFYAPELLFFAKRYKAAFTECCQAADKAACLLPKLDELRDEGKASSAKQRLKCASLQKFGERAFKAWAVARLSQRFPKAEFAEVSKLVTDLTKVHTECCHGDLLECADDRADLAKYICENQDSISSKLKECCEKPLLEKSHCIAEVENDEMPADLPSLAADFVESKDVCKNYAEAKDVFLGMFLYEYARRHPDYSVVLLLRLAKTYETTLEKCCAAADPHECYAKVFDEFKPLVEEPQNLIKQNCELFEQLGEYKFQNALLVRYTKKVPQVSTPTLVEVSRNLGKVGSKCCKHPEAKRMPCAEDYLSVVLNQLCVLHEKTPVSDRVTKCCTESLVNRRPCFSALGVDETYVPKEFNAETFTFHADICTLSEKERQIKKQTALVELVKHKPKATKEQLKAVMDKFAAFVEKCCKADDKETCFAEEGPKLVAASQAALGL

SEQ ID NO: 596 - protein, 585 aa, Artificial
  HALB variant 15
DAHKSEVAHRFKDLGEENFKALVLIAFAQYLQQSPFEDHVKLVNEVTEFAKTCVADESAENCDKSLHTLFGDKLCTVATLRETYGEMADCCAKQEPERNECFLQHKDDNPNLPRLVRPEVDVMCTAFHDNEETFLKKYLYEIARRHPYFYAPELLFFAKRYKAAFTECCQAADKAACLLPKLDELRDEGKASSAKQRLKCASLQKFGERAFKAWAVARLSQRFPKAEFAEVSKLVTDLTKVHTECCHGDLLECADDRADLAKYICENQDSISSKLKECCEKPLLEKSHCIAEVENDEMPADLPSLAADFVESKDVCKNYAEAKDVFLGMFLYEYARRHPDYSVVLLLRLAKTYETTLEKCCAAADPHECYAKVFDEFKPLVEEPQNLIKQNCELFEQLGEYKFQNALLVRYTKKVPQVSTPTLVEVSRNLGKVGSKCCKHPEAKRMPCAEDYLSVVLNQLCVLHEKTPVSDRVTKCCTESLVNRRPCFSALDVDETYVPKEFNAETFTFHADICTLSEKERQIKKQTALVELVKHKPKATKEQLKAVMDKFAAFVEKCCKADDKETCFAEEGPKLVAASQAALGL

SEQ ID NO: 597 - protein, 585 aa, Artificial
  HALB variant 16
DAHKSEVAHRFKDLGEENFKALVLIAFAQYLQQSPFEDHVKLVNEVTEFAKTCVADESAENCDKSLHTLFGDKLCTVATLRETYGEMADCCAKQEPERNECFLQHKDDNPNLPRLVRPEVDVMCTAFHDNEETFLKKYLYEIARRHPYFYAPELLFFAKRYKAAFTECCQAADKAACLLPKLDELRDEGKASSAKQRLKCASLQKFGERAFKAWAVARLSQRFPKAEFAEVSKLVTDLTKVHTECCHGDLLECADDRADLAKYICENQDSISSKLKECCEKPLLEKSHCIAEVENDEMPADLPSLAADFVESKDVCKNYAEAKDVFLGMFLYEYARRHPDYSVVLLLRLAKTYETTLEKCCAAADPHECYAKVFDEFKPLVEEPQNLIKQNCELFEQLGEYKFQNALLVRYTKKVPQVSTPTLVEVSRNLGKVGSKCCKHPEAKRMPCAEDYLSVVLNQLCVLHEKTPVSDRVTKCCTESLVNRRPCFSALEVDETYVPKEFNAETFTFHADICTLSEKERQIKKQTALVELVKHKPKATKEQLKAVMDKFAAFVEKCCKADDKETCFAEEGPHLVAASQAALGL

SEQ ID NO: 598 - protein, 585 aa, Artificial
  HALB variant 17
DAHKSEVAHRFKDLGEENFKALVLIAFAQYLQQSPFEDHVKLVNEVTEFAKTCVADESAENCDKSLHTLFGDKLCTVATLRETYGEMADCCAKQEPERNECFLQHKDDNPNLPRLVRPEVDVMCTAFHDNEETFLKKYLYEIARRHPYFYAPELLFFAKRYKAAFTECCQAADKAACLLPKLDELRDEGKASSAKQRLKCASLQKFGERAFKAWAVARLSQRFPKAEFAEVSKLVTDLTKVHTECCHGDLLECADDRADLAKYICENQDSISSKLKECCEKPLLEKSHCIAEVENDEMPADLPSLAADFVESKDVCKNYAEAKDVFLGMFLYEYARRHPDYSVVLLLRLAKTYETTLEKCCAAADPHECYAKVFDEFKPLVEEPQNLIKQNCELFEQLGEYKFQNALLVRYTKKVPQVSTPTLVEVSRNLGKVGSKCCKHPEAKRMPCAEDYLSVVLNQLCVLHEKTPVSDRVTKCCTESLVNRRPCFSALEVDETYVPKEFNAETFTFHADICTLSEKERQIKKQTALVELVKHKPKATKEQLKAVMDDFAAFVEKCCKADDKETCFAEEGPHLVAASKAALGL

SEQ ID NO: 599 - protein, 585 aa, Artificial
  HALB variant 18
DAHKSEVAHRFKDLGEENFKALVLIAFAQYLQQSPFEDHVKLVNEVTEFAKTCVADESAENCDKSLHTLFGDKLCTVATLRETYGEMADCCAKQEPERNECFLQHKDDNPNLPRLVRPEVDVMCTAFHDNEETFLKKYLYEIARRHPYFYAPELLFFAKRYKAAFTECCQAADKAACLLPKLDELRDEGKASSAKQRLKCASLQKFGERAFKAWAVARLSQRFPKAEFAEVSKLVTDLTKVHTECCHGDLLECADDRADLAKYICENQDSISSKLKECCEKPLLEKSHCIAEVENDEMPADLPSLAADFVESKDVCKNYAEAKDVFLGMFLYEYARRHPDYSVVLLLRLAKTYETTLEKCCAAADPHECYAKVFDEFKPLVEEPQNLIKQNCELFEQLGEYKFQNALLVRYTKKVPQVSTPTLVEVSRNLGKVGSKCCKHPEAKRMPCAEDYLSVVLNQLCVLHEKTPVSDRVTKCCTESLVNRRPCFSALEVDETYVPKEFNAETFTFHADICTLSEKERQIKKQTALVELVKHKPKATKEQLKAVMDKFAAFVEKCCKADDKETCFAEEGPKLVAASKAALGL

SEQ ID NO: 600 - protein, 585 aa, Artificial
  HALB variant 19
DAHKSEVAHRFKDLGEENFKALVLIAFAQYLQQSPFEDHVKLVNEVTEFAKTCVADESAENCDKSLHTLFGDKLCTVATLRETYGEMADCCAKQEPERNECFLQHKDDNPNLPRLVRPEVDVMCTAFHDNEETFLKKYLYEIARRHPYFYAPELLFFAKRYKAAFTECCQAADKAACLLPKLDELRDEGKASSAKQRLKCASLQKFGERAFKAWAVARLSQRFPKAEFAEVSKLVTDLTKVHTECCHGDLLECADDRADLAKYICENQDSISSKLKECCEKPLLEKSHCIAEVENDEMPADLPSLAADFVESKDVCKNYAEAKDVFLGMFLYEYARRHPDYSVVLLLRLAKTYETTLEKCCAAADPHECYAKVFDEFKPLVEEPQNLIKQNCELFEQLGEYKFQNALLVRYTKKVPQVSTPTLVEVSRNLGKVGSKCCKHPEAKRMPCAEDYLSVVLNQLCVLHEKTPVSDRVTKCCTESLVNRRPCFSALDVDETYVPKEFNAETFTFHADICTLSEKERQIKKQTALVELVKHKPKATKEQLKAVMDDFAAFVEKCCKADDKETCFAEEGPKLVAASKAALGL

SEQ ID NO: 601 - protein, 585 aa, Artificial
  HALB variant 20
DAHKSEVAHRFKDLGEENFKALVLIAFAQYLQQAPFEDHVKLVNEVTEFAKTCVADESAENCDKSLHTLFGDKLCTVATLRETYGEMADCCAKQEPERNECFLQHKDDNPNLPRLVRPEVDVMCTAFHDNEETFLKKYLYEIARRHPYFYAPELLFFAKRYKAAFTECCQAADKAACLLPKLDELRDEGKASSAKQRLKCASLQKFGERAFKAWAVARLSQRFPKAEFAEVSKLVTDLTKVHTECCHGDLLECADDRADLAKYICENQDSISSKLKECCEKPLLEKSHCIAEVENDEMPADLPSLAADFVESKDVCKNYAEAKDVFLGMFLYEYARRHPDYSVVLLLRLAKTYETTLEKCCAAADPHECYAKVFDEFKPLVEEPQNLIKQNCELFEQLGEYKFQNALLVRYTKKVPQVSTPTLVEVSRNLGKVGSKCCKHPEAKRMPCAEDYLSVVLNQLCVLHEKTPVSDRVTKCCTESLVNRRPCFSALEVDETYVPKEFNAETFTFHADICTLSEKERQIKKQTALVELVKHKPKATKEQLKAVMDDFAAFVEKCCKADDKETCFAEEGKKLVAASQAALGL

SEQ ID NO: 602 - protein, 585 aa, Artificial
  HALB variant 21
DAHKSEVAHRFKDLGEENFKALVLIAFAQYLQQAPFEDHVKLVNEVTEFAKTCVADESAENCDKSLHTLFGDKLCTVATLRETYGEMADCCAKQEPERNECFLQHKDDNPNLPRLVRPEVDVMCTAFHDNEETFLKKYLYEIARRHPYFYAPELLFFAKRYKAAFTECCQAADKAACLLPKLDELRDEGKASSAKQRLKCASLQKFGERAFKAWAVARLSQRFPKAEFAEVSKLVTDLTKVHTECCHGDLLECADDRADLAKYICENQDSISSKLKECCEKPLLEKSHCIAEVENDEMPADLPSLAADFVESKDVCKNYAEAKDVFLGMFLYEYARRHPDYSVVLLLRLAKTYETTLEKCCAAADPHECYAKVFDEFKPLVEEPQNLIKQNCELFEQLGEYKFQNALLVRYTKKVPQVSTPTLVEVSRNLGKVGSKCCKHPEAKRMPCAEDYLSVVLNQLCVLHEKTPVSDRVTKCCTESLVNRRPCFSALEVDETYVPKEFNAGTFTFHADICTLSEKERQIKKQTALVELVKHKPKATKEQLKAAMDDFAAFVEKCCKADDKETCFAEEGKKLVAASQAALGL

SEQ ID NO: 603 - protein, 585 aa, Artificial
  HALB variant 22
DAHKSEVAHRFKDLGEENFKALVLIAFAQYLQQAPFEDHVKLVNEVTEFAKTCVADESAENCDKSLHTLFGDKLCTVATLRETYGEMADCCAKQEPERNECFLQHKDDNPNLPRLVRPEVDVMCTAFHDNEETFLKKYLYEIARRHPYFYAPELLFFAKRYKAAFTECCQAADKAACLLPKLDELRDEGKASSAKQRLKCASLQKFGERAFKAWAVARLSQRFPKAEFAEVSKLVTDLTKVHTECCHGDLLECADDRADLAKYICENQDSISSKLKECCEKPLLEKSHCIAEVENDEMPADLPSLAADFVESKDVCKNYAEAKDVFLGMFLYEYARRHPDYSVVLLLRLAKTYETTLEKCCAAADPHECYAKVFDEFKPLVEEPQNLIKQNCELFEQLGEYKFQNALLVRYTKKVPQVSTPTLVEVSRNLGKVGSKCCKHPEAKRMPCAEDYLSVVLNQLCVLHEKTPVSDRVTKCCTESLVNRRPCFSALEVDETYVPKEFNAETFTFHADICTLSEKERQIKKQTALVELVKHKPKATKEQLKAVMDDFAAFVEKCCKADDKETCFAEEGPKLVAASQAALGL

SEQ ID NO: 604 - protein, 585 aa, Artificial
  HALB variant 23
DAHKSEVAHRFKDLGEENFKALVLIAFAQYLQQAPFEDHVKLVNEVTEFAKTCVADESAENCDKSLHTLFGDKLCTVATLRETYGEMADCCAKQEPERNECFLQHKDDNPNLPRLVRPEVDVMCTAFHDNEETFLKKYLYEIARRHPYFYAPELLFFAKRYKAAFTECCQAADKAACLLPKLDELRDEGKASSAKQRLKCASLQKFGERAFKAWAVARLSQRFPKAEFAEVSKLVTDLTKVHTECCHGDLLECADDRADLAKYICENQDSISSKLKECCEKPLLEKSHCIAEVENDEMPADLPSLAADFVESKDVCKNYAEAKDVFLGMFLYEYARRHPDYSVVLLLRLAKTYETTLEKCCAAADPHECYAKVFDEFKPLVEEPQNLIKQNCELFEQLGEYKFQNALLVRYTKKVPQVSTPTLVEVSRNLGKVGSKCCKHPEAKRMPCAEDYLSVVLNQLCVLHEKTPVSDRVTKCCTESLVNRRPCFSALDVDETYVPKEFNAETFTFHADICTLSEKERQIKKQTALVELVKHKPKATKEQLKAVMDDFAAFVEKCCKADDKETCFAEEGPHLVAASKAALGL

SEQ ID NO: 605 - protein, 585 aa, Artificial
  HALB variant 24
DAHKSEVAHRFKDLGEENFKALVLIAFAQYLQQAPFEDHVKLVNEVTEFAKTCVADESAENCDKSLHTLFGDKLCTVATLRETYGEMADCCAKQEPERNECFLQHKDDNPNLPRLVRPEVDVMCTAFHDNEETFLKKYLYEIARRHPYFYAPELLFFAKRYKAAFTECCQAADKAACLLPKLDELRDEGKASSAKQRLKCASLQKFGERAFKAWAVARLSQRFPKAEFAEVSKLVTDLTKVHTECCHGDLLECADDRADLAKYICENQDSISSKLKECCEKPLLEKSHCIAEVENDEMPADLPSLAADFVESKDVCKNYAEAKDVFLGMFLYEYARRHPDYSVVLLLRLAKTYETTLEKCCAAADPHECYAKVFDEFKPLVEEPQNLIKQNCELFEQLGEYKFQNALLVRYTKKVPQVSTPTLVEVSRNLGKVGSKCCKHPEAKRMPCAEDYLSVVLNQLCVLHEKTPVSDRVTKCCTESLVNRRPCFSALGVDETYVPKEFNAETFTFHADICTLSEKERQIKKQTALVELVKHKPKATKEQLKAVMDKFAAFVEKCCKADDKETCFAEEGPKLVAASQAALGL

SEQ ID NO: 606 - protein, 585 aa, Artificial
  HALB variant 25
DAHKSEVAHRFKDLGEENFKALVLIAFAQYLQQAPFEDHVKLVNEVTEFAKTCVADESAENCDKSLHTLFGDKLCTVATLRETYGEMADCCAKQEPERNECFLQHKDDNPNLPRLVRPEVDVMCTAFHDNEETFLKKYLYEIARRHPYFYAPELLFFAKRYKAAFTECCQAADKAACLLPKLDELRDEGKASSAKQRLKCASLQKFGERAFKAWAVARLSQRFPKAEFAEVSKLVTDLTKVHTECCHGDLLECADDRADLAKYICENQDSISSKLKECCEKPLLEKSHCIAEVENDEMPADLPSLAADFVESKDVCKNYAEAKDVFLGMFLYEYARRHPDYSVVLLLRLAKTYETTLEKCCAAADPHECYAKVFDEFKPLVEEPQNLIKQNCELFEQLGEYKFQNALLVRYTKKVPQVSTPTLVEVSRNLGKVGSKCCKHPEAKRMPCAEDYLSVVLNQLCVLHEKTPVSDRVTKCCTESLVNRRPCFSALDVDETYVPKEFNAETFTFHADICTLSEKERQIKKQTALVELVKHKPKATKEQLKAVMDKFAAFVEKCCKADDKETCFAEEGPKLVAASQAALGL

SEQ ID NO: 607 - protein, 585 aa, Artificial
  HALB variant 26
DAHKSEVAHRFKDLGEENFKALVLIAFAQYLQQAPFEDHVKLVNEVTEFAKTCVADESAENCDKSLHTLFGDKLCTVATLRETYGEMADCCAKQEPERNECFLQHKDDNPNLPRLVRPEVDVMCTAFHDNEETFLKKYLYEIARRHPYFYAPELLFFAKRYKAAFTECCQAADKAACLLPKLDELRDEGKASSAKQRLKCASLQKFGERAFKAWAVARLSQRFPKAEFAEVSKLVTDLTKVHTECCHGDLLECADDRADLAKYICENQDSISSKLKECCEKPLLEKSHCIAEVENDEMPADLPSLAADFVESKDVCKNYAEAKDVFLGMFLYEYARRHPDYSVVLLLRLAKTYETTLEKCCAAADPHECYAKVFDEFKPLVEEPQNLIKQNCELFEQLGEYKFQNALLVRYTKKVPQVSTPTLVEVSRNLGKVGSKCCKHPEAKRMPCAEDYLSVVLNQLCVLHEKTPVSDRVTKCCTESLVNRRPCFSALEVDETYVPKEFNAETFTFHADICTLSEKERQIKKQTALVELVKHKPKATKEQLKAVMDKFAAFVEKCCKADDKETCFAEEGPHLVAASQAALGL

SEQ ID NO: 608 - protein, 585 aa, Artificial
  HALB variant 27
DAHKSEVAHRFKDLGEENFKALVLIAFAQYLQQAPFEDHVKLVNEVTEFAKTCVADESAENCDKSLHTLFGDKLCTVATLRETYGEMADCCAKQEPERNECFLQHKDDNPNLPRLVRPEVDVMCTAFHDNEETFLKKYLYEIARRHPYFYAPELLFFAKRYKAAFTECCQAADKAACLLPKLDELRDEGKASSAKQRLKCASLQKFGERAFKAWAVARLSQRFPKAEFAEVSKLVTDLTKVHTECCHGDLLECADDRADLAKYICENQDSISSKLKECCEKPLLEKSHCIAEVENDEMPADLPSLAADFVESKDVCKNYAEAKDVFLGMFLYEYARRHPDYSVVLLLRLAKTYETTLEKCCAAADPHECYAKVFDEFKPLVEEPQNLIKQNCELFEQLGEYKFQNALLVRYTKKVPQVSTPTLVEVSRNLGKVGSKCCKHPEAKRMPCAEDYLSVVLNQLCVLHEKTPVSDRVTKCCTESLVNRRPCFSALEVDETYVPKEFNAETFTFHADICTLSEKERQIKKQTALVELVKHKPKATKEQLKAVMDDFAAFVEKCCKADDKETCFAEEGPHLVAASKAALGL

SEQ ID NO: 609 - protein, 585 aa, Artificial
  HALB variant 28
DAHKSEVAHRFKDLGEENFKALVLIAFAQYLQQAPFEDHVKLVNEVTEFAKTCVADESAENCDKSLHTLFGDKLCTVATLRETYGEMADCCAKQEPERNECFLQHKDDNPNLPRLVRPEVDVMCTAFHDNEETFLKKYLYEIARRHPYFYAPELLFFAKRYKAAFTECCQAADKAACLLPKLDELRDEGKASSAKQRLKCASLQKFGERAFKAWAVARLSQRFPKAEFAEVSKLVTDLTKVHTECCHGDLLECADDRADLAKYICENQDSISSKLKECCEKPLLEKSHCIAEVENDEMPADLPSLAADFVESKDVCKNYAEAKDVFLGMFLYEYARRHPDYSVVLLLRLAKTYETTLEKCCAAADPHECYAKVFDEFKPLVEEPQNLIKQNCELFEQLGEYKFQNALLVRYTKKVPQVSTPTLVEVSRNLGKVGSKCCKHPEAKRMPCAEDYLSVVLNQLCVLHEKTPVSDRVTKCCTESLVNRRPCFSALEVDETYVPKEFNAETFTFHADICTLSEKERQIKKQTALVELVKHKPKATKEQLKAVMDKFAAFVEKCCKADDKETCFAEEGPKLVAASKAALGL

SEQ ID NO: 610 - protein, 585 aa, Artificial
  HALB variant 29
DAHKSEVAHRFKDLGEENFKALVLIAFAQYLQQAPFEDHVKLVNEVTEFAKTCVADESAENCDKSLHTLFGDKLCTVATLRETYGEMADCCAKQEPERNECFLQHKDDNPNLPRLVRPEVDVMCTAFHDNEETFLKKYLYEIARRHPYFYAPELLFFAKRYKAAFTECCQAADKAACLLPKLDELRDEGKASSAKQRLKCASLQKFGERAFKAWAVARLSQRFPKAEFAEVSKLVTDLTKVHTECCHGDLLECADDRADLAKYICENQDSISSKLKECCEKPLLEKSHCIAEVENDEMPADLPSLAADFVESKDVCKNYAEAKDVFLGMFLYEYARRHPDYSVVLLLRLAKTYETTLEKCCAAADPHECYAKVFDEFKPLVEEPQNLIKQNCELFEQLGEYKFQNALLVRYTKKVPQVSTPTLVEVSRNLGKVGSKCCKHPEAKRMPCAEDYLSVVLNQLCVLHEKTPVSDRVTKCCTESLVNRRPCFSALDVDETYVPKEFNAETFTFHADICTLSEKERQIKKQTALVELVKHKPKATKEQLKAVMDDFAAFVEKCCKADDKETCFAEEGPKLVAASKAALGL

SEQ ID NO: 611 - protein, 330 aa, Artificial
  Cross body 1 HC
ASTKGPSVFPLAPSSKSTSGGTAALGCLVKDYFPEPVTVSWNSGALTSGVHTFPAVLQSSGLYSLSSVVTVPSSSLGTQTYICNVNHKPSNTKVDKKVEPKSCDKTHTCPPCPAPELLGGPSVFLFPPKPKDTLMISRTPEVTCVVVDVSHEDPEVKFNWYVDGVEVHNAKTKPCEEQYGSTYRCVSVLTVLHQDWLNGKEYKCKVSNKALPAPIEKTISKAKGQPREPQVYTLPPSREEMTKNQVSLTCLVKGFYPSDIAVEWESNGQPENNYDTTPPVLDSDGSFFLYSDLTVDKSRWQQGNVFSCSVMHEALHNHYTQKSLSLSPGK

SEQ ID NO: 612 - protein, 333 aa, Artificial
  Cross body 1 LC
GQPKAAPSVTLFPPSSEELQANKATLVCLISDFYPGAVTVAWKADSSPVKAGVETTTPSKQSNNKYAASSYLSLTPEQWKSHRSYSCQVTHEGSTVEKTVAPTECSDKTHTCPPCPAPELLGGPSVFLFPPKPKDTLMISRTPEVTCVVVDVSHEDPEVKFNWYVDGVEVHNAKTKPCEEQYGSTYRCVSVLTVLHQDWLNGKEYKCKVSNKALPAPIEKTISKAKGQPREPQVYTLPPSRKEMTKNQVSLTCLVKGFYPSDIAVEWESNGQPENNYKTTPPVLKSDGSFFLYSKLTVDKSRWQQGNVFSCSVMHEALHNHYTQKSLSLSPGK

SEQ ID NO: 613 - protein, 330 aa, Artificial
  Cross body 2 HC
ASTKGPSVFPLAPCSRSTSESTAALGCLVKDYFPEPVTVSWNSGALTSGVHTFPAVLQSSGLYSLSSVVTVPSSNFGTQTYTCNVDHKPSNTKVDKTVEPKSSDKTHTCPPCPAPEAAGGPSVFLFPPKPKDTLMISRTPEVTCVVVDVSHEDPEVKFNWYVDGVEVHNAKTKPREEQYNSTYRVVSVLTVLHQDWLNGKEYKCKVSNKALPAPIEKTISKAKGQPREPQVYTLPPSREEMTKNQVSLTCLVKGFYPSDIAVEWESNGQPENNYDTTPPVLDSDGSFFLYSDLTVDKSRWQQGNVFSCSVMHEALHNHYTQKSLSLSPGK

SEQ ID NO: 614 - protein, 338 aa, Artificial
  Cross body 2 LC
GQPKAAPSVTLFPPSSEELQANKATLVCLISDFYPGAVTVAWKADSSPVKAGVETTTPSKQSNNKYAASSYLSLTPEQWKSHRSYSCQVTHEGSTVEKTVAPTECSEPKSSDKTHTCPPCPAPEAAGGPSVFLFPPKPKDTLMISRTPEVTCVVVDVSHEDPEVKFNWYVDGVEVHNAKTKPREEQYNSTYRVVSVLTVLHQDWLNGKEYKCKVSNKALPAPIEKTISKAKGQPREPQVYTLPPSRKEMTKNQVSLTCLVKGFYPSDIAVEWESNGQPENNYKTTPPVLKSDGSFFLYSKLTVDKSRWQQGNVFSCSVMHEALHNHYTQKSLSLSPGK

SEQ ID NO: 615 - protein, 227 aa, Artificial
  Hetero-Fc binder Fc
DKTHTCPPCPAPELLGGPSVFLFPPKPKDTLMISRTPEVTCVVVDVSHEDPEVKFNWYVDGVEVHNAKTKPCEEQYGSTYRCVSVLTVLHQDWLNGKEYKCKVSNKALPAPIEKTISKAKGQPREPQVYTLPPSRKEMTKNQVSLTCLVKGFYPSDIAVEWESNGQPENNYKTTPPVLKSDGSFFLYSKLTVDKSRWQQGNVFSCSVMHEALHNHYTQKSLSLSPGK

SEQ ID NO: 616 - protein, 227 aa, Artificial
  Hetero-Fc partner Fc
DKTHTCPPCPAPELLGGPSVFLFPPKPKDTLMISRTPEVTCVVVDVSHEDPEVKFNWYVDGVEVHNAKTKPCEEQYGSTYRCVSVLTVLHQDWLNGKEYKCKVSNKALPAPIEKTISKAKGQPREPQVYTLPPSREEMTKNQVSLTCLVKGFYPSDIAVEWESNGQPENNYDTTPPVLDSDGSFFLYSDLTVDKSRWQQGNVFSCSVMHEALHNHYTQKSLSLSPGK

SEQ ID NO: 617 - protein, 232 aa, Artificial
  Maxi-body 1 target Fc
EPKSSDKTHTCPPCPAPELLGGPSVFLFPPKPKDTLMISRTPEVTCVVVDVSHEDPEVKFNWYVDGVEVHNAKTKPCEEQYGSTYRCVSVLTVLHQDWLNGKEYKCKVSNKALPAPIEKTISKAKGQPREPQVYTLPPSRKEMTKNQVSLTCLVKGFYPSDIAVEWESNGQPENNYKTTPPVLKSDGSFFLYSKLTVDKSRWQQGNVFSCSVMHEALHNHYTQKSLSLSPGK

SEQ ID NO: 618 - protein, 232 aa, Artificial
  Maxi-body 1 CD3 Fc
EPKSSDKTHTCPPCPAPELLGGPSVFLFPPKPKDTLMISRTPEVTCVVVDVSHEDPEVKFNWYVDGVEVHNAKTKPCEEQYGSTYRCVSVLTVLHQDWLNGKEYKCKVSNKALPAPIEKTISKAKGQPREPQVYTLPPSREEMTKNQVSLTCLVKGFYPSDIAVEWESNGQPENNYDTTPPVLDSDGSFFLYSDLTVDKSRWQQGNVFSCSVMHEALHNHYTQKSLSLSPGK

SEQ ID NO: 619 - protein, 232 aa, Artificial
  Maxi-body 2 target Fc
EPKSSDKTHTCPPCPAPEAAGGPSVFLFPPKPKDTLMISRTPEVTCVVVDVSHEDPEVKFNWYVDGVEVHNAKTKPREEQYNSTYRVVSVLTVLHQDWLNGKEYKCKVSNKALPAPIEKTISKAKGQPREPQVYTLPPSRKEMTKNQVSLTCLVKGFYPSDIAVEWESNGQPENNYKTTPPVLKSDGSFFLYSKLTVDKSRWQQGNVFSCSVMHEALHNHYTQKSLSLSPGK

SEQ ID NO: 620 - protein, 232 aa, Artificial
  Maxi-body 2 CD3 Fc
EPKSSDKTHTCPPCPAPEAAGGPSVFLFPPKPKDTLMISRTPEVTCVVVDVSHEDPEVKFNWYVDGVEVHNAKTKPREEQYNSTYRVVSVLTVLHQDWLNGKEYKCKVSNKALPAPIEKTISKAKGQPREPQVYTLPPSREEMTKNQVSLTCLVKGFYPSDIAVEWESNGQPENNYDTTPPVLDSDGSFFLYSDLTVDKSRWQQGNVFSCSVMHEALHNHYTQKSLSLSPGK

SEQ ID NO: 621 - protein, 217 aa, Artificial
  Mono Fc
APELLGGPSVFLFPPKPKDTLMISRTPEVTCVVVDVSHEDPEVKFNWYVDGVEVHNAKTKPREEQYNSTYRVVSVLTVLHQDWLNGKEYKCKVSNKALPAPIEKTISKAKGQPREPQVTTLPPSREEMTKNQVSLTCLVKGFYPSDIAVEWESNGQPENNYDTTPPVLDSDGSFFLYSDLTVDKSRWQQGNVFSCSVMHEALHNHYTQKSLSLSPGK

SEQ ID NO: 622 - protein, 227 aa, Artificial
  Fc monomer-1 +c/-g
DKTHTCPPCPAPELLGGPSVFLFPPKPKDTLMISRTPEVTCVVVDVSHEDPEVKFNWYVDGVEVHNAKTKPCEEQYGSTYRCVSVLTVLHQDWLNGKEYKCKVSNKALPAPIEKTISKAKGQPREPQVYTLPPSREEMTKNQVSLTCLVKGFYPSDIAVEWESNGQPENNYKTTPPVLDSDGSFFLYSKLTVDKSRWQQGNVFSCSVMHEALHNHYTQKSLSLSPGK

SEQ ID NO: 623 - protein, 225 aa, Artificial
  Fc monomer-2 +c/-g/ delGK
DKTHTCPPCPAPELLGGPSVFLFPPKPKDTLMISRTPEVTCVVVDVSHEDPEVKFNWYVDGVEVHNAKTKPCEEQYGSTYRCVSVLTVLHQDWLNGKEYKCKVSNKALPAPIEKTISKAKGQPREPQVYTLPPSREEMTKNQVSLTCLVKGFYPSDIAVEWESNGQPENNYKTTPPVLDSDGSFFLYSKLTVDKSRWQQGNVFSCSVMHEALHNHYTQKSLSLSP

SEQ ID NO: 624 - protein, 227 aa, Artificial
  Fc monomer-3 -c/+g
DKTHTCPPCPAPELLGGPSVFLFPPKPKDTLMISRTPEVTCVVVDVSHEDPEVKFNWYVDGVEVHNAKTKPREEQYNSTYRVVSVLTVLHQDWLNGKEYKCKVSNKALPAPIEKTISKAKGQPREPQVYTLPPSREEMTKNQVSLTCLVKGFYPSDIAVEWESNGQPENNYKTTPPVLDSDGSFFLYSKLTVDKSRWQQGNVFSCSVMHEALHNHYTQKSLSLSPGK

SEQ ID NO: 625 - protein, 225 aa, Artificial
  Fc monomer-4 -c/+g/ delGK
DKTHTCPPCPAPELLGGPSVFLFPPKPKDTLMISRTPEVTCVVVDVSHEDPEVKFNWYVDGVEVHNAKTKPREEQYNSTYRVVSVLTVLHQDWLNGKEYKCKVSNKALPAPIEKTISKAKGQPREPQVYTLPPSREEMTKNQVSLTCLVKGFYPSDIAVEWESNGQPENNYKTTPPVLDSDGSFFLYSKLTVDKSRWQQGNVFSCSVMHEALHNHYTQKSLSLSP

SEQ ID NO: 626 - protein, 227 aa, Artificial
  Fc monomer-5 -c/-g
DKTHTCPPCPAPELLGGPSVFLFPPKPKDTLMISRTPEVTCVVVDVSHEDPEVKFNWYVDGVEVHNAKTKPREEQYGSTYRVVSVLTVLHQDWLNGKEYKCKVSNKALPAPIEKTISKAKGQPREPQVYTLPPSREEMTKNQVSLTCLVKGFYPSDIAVEWESNGQPENNYKTTPPVLDSDGSFFLYSKLTVDKSRWQQGNVFSCSVMHEALHNHYTQKSLSLSPGK

SEQ ID NO: 627 - protein, 225 aa, Artificial
  Fc monomer-6 -c/-g/ delGK
DKTHTCPPCPAPELLGGPSVFLFPPKPKDTLMISRTPEVTCVVVDVSHEDPEVKFNWYVDGVEVHNAKTKPREEQYGSTYRVVSVLTVLHQDWLNGKEYKCKVSNKALPAPIEKTISKAKGQPREPQVYTLPPSREEMTKNQVSLTCLVKGFYPSDIAVEWESNGQPENNYKTTPPVLDSDGSFFLYSKLTVDKSRWQQGNVFSCSVMHEALHNHYTQKSLSLSP

SEQ ID NO: 628 - protein, 227 aa, Artificial
  Fc monomer-7 +c/+g
DKTHTCPPCPAPELLGGPSVFLFPPKPKDTLMISRTPEVTCVVVDVSHEDPEVKFNWYVDGVEVHNAKTKPCEEQYNSTYRCVSVLTVLHQDWLNGKEYKCKVSNKALPAPIEKTISKAKGQPREPQVYTLPPSREEMTKNQVSLTCLVKGFYPSDIAVEWESNGQPENNYKTTPPVLDSDGSFFLYSKLTVDKSRWQQGNVFSCSVMHEALHNHYTQKSLSLSPGK

SEQ ID NO: 629 - protein, 225 aa, Artificial
  Fc monomer-8 +c/+g/ delGK
DKTHTCPPCPAPELLGGPSVFLFPPKPKDTLMISRTPEVTCVVVDVSHEDPEVKFNWYVDGVEVHNAKTKPCEEQYNSTYRCVSVLTVLHQDWLNGKEYKCKVSNKALPAPIEKTISKAKGQPREPQVYTLPPSREEMTKNQVSLTCLVKGFYPSDIAVEWESNGQPENNYKTTPPVLDSDGSFFLYSKLTVDKSRWQQGNVFSCSVMHEALHNHYTQKSLSLSP

SEQ ID NO: 630 - protein, 484 aa, Artificial
  scFc-1
DKTHTCPPCPAPELLGGPSVFLFPPKPKDTLMISRTPEVTCVVVDVSHEDPEVKFNWYVDGVEVHNAKTKPCEEQYGSTYRCVSVLTVLHQDWLNGKEYKCKVSNKALPAPIEKTISKAKGQPREPQVYTLPPSREEMTKNQVSLTCLVKGFYPSDIAVEWESNGQPENNYKTTPPVLDSDGSFFLYSKLTVDKSRWQQGNVFSCSVMHEALHNHYTQKSLSLSPGKGGGGSGGGGSGGGGSGGGGSGGGGSGGGGSDKTHTCPPCPAPELLGGPSVFLFPPKPKDTLMISRTPEVTCVVVDVSHEDPEVKFNWYVDGVEVHNAKTKPCEEQYGSTYRCVSVLTVLHQDWLNGKEYKCKVSNKALPAPIEKTISKAKGQPREPQVYTLPPSREEMTKNQVSLTCLVKGFYPSDIAVEWESNGQPENNYKTTPPVLDSDGSFFLYSKLTVDKSRWQQGNVFSCSVMHEALHNHYTQKSLSLSPGK

SEQ ID NO: 631 - protein, 480 aa, Artificial
  scFc-2
DKTHTCPPCPAPELLGGPSVFLFPPKPKDTLMISRTPEVTCVVVDVSHEDPEVKFNWYVDGVEVHNAKTKPCEEQYGSTYRCVSVLTVLHQDWLNGKEYKCKVSNKALPAPIEKTISKAKGQPREPQVYTLPPSREEMTKNQVSLTCLVKGFYPSDIAVEWESNGQPENNYKTTPPVLDSDGSFFLYSKLTVDKSRWQQGNVFSCSVMHEALHNHYTQKSLSLSPGGGGSGGGGSGGGGSGGGGSGGGGSGGGGSDKTHTCPPCPAPELLGGPSVFLFPPKPKDTLMISRTPEVTCVVVDVSHEDPEVKFNWYVDGVEVHNAKTKPCEEQYGSTYRCVSVLTVLHQDWLNGKEYKCKVSNKALPAPIEKTISKAKGQPREPQVYTLPPSREEMTKNQVSLTCLVKGFYPSDIAVEWESNGQPENNYKTTPPVLDSDGSFFLYSKLTVDKSRWQQGNVFSCSVMHEALHNHYTQKSLSLSP

SEQ ID NO: 632 - protein, 484 aa, Artificial
  scFc-3
DKTHTCPPCPAPELLGGPSVFLFPPKPKDTLMISRTPEVTCVVVDVSHEDPEVKFNWYVDGVEVHNAKTKPREEQYNSTYRVVSVLTVLHQDWLNGKEYKCKVSNKALPAPIEKTISKAKGQPREPQVYTLPPSREEMTKNQVSLTCLVKGFYPSDIAVEWESNGQPENNYKTTPPVLDSDGSFFLYSKLTVDKSRWQQGNVFSCSVMHEALHNHYTQKSLSLSPGKGGGGSGGGGSGGGGSGGGGSGGGGSGGGGSDKTHTCPPCPAPELLGGPSVFLFPPKPKDTLMISRTPEVTCVVVDVSHEDPEVKFNWYVDGVEVHNAKTKPREEQYNSTYRVVSVLTVLHQDWLNGKEYKCKVSNKALPAPIEKTISKAKGQPREPQVYTLPPSREEMTKNQVSLTCLVKGFYPSDIAVEWESNGQPENNYKTTPPVLDSDGSFFLYSKLTVDKSRWQQGNVFSCSVMHEALHNHYTQKSLSLSPGK

SEQ ID NO: 633 - protein, 480 aa, Artificial
  scFc-4
DKTHTCPPCPAPELLGGPSVFLFPPKPKDTLMISRTPEVTCVVVDVSHEDPEVKFNWYVDGVEVHNAKTKPREEQYNSTYRVVSVLTVLHQDWLNGKEYKCKVSNKALPAPIEKTISKAKGQPREPQVYTLPPSREEMTKNQVSLTCLVKGFYPSDIAVEWESNGQPENNYKTTPPVLDSDGSFFLYSKLTVDKSRWQQGNVFSCSVMHEALHNHYTQKSLSLSPGGGGSGGGGSGGGGSGGGGSGGGGSGGGGSDKTHTCPPCPAPELLGGPSVFLFPPKPKDTLMISRTPEVTCVVVDVSHEDPEVKFNWYVDGVEVHNAKTKPREEQYNSTYRVVSVLTVLHQDWLNGKEYKCKVSNKALPAPIEKTISKAKGQPREPQVYTLPPSREEMTKNQVSLTCLVKGFYPSDIAVEWESNGQPENNYKTTPPVLDSDGSFFLYSKLTVDKSRWQQGNVFSCSVMHEALHNHYTQKSLSLSP

SEQ ID NO: 634 - protein, 484 aa, Artificial
  scFc-5
DKTHTCPPCPAPELLGGPSVFLFPPKPKDTLMISRTPEVTCVVVDVSHEDPEVKFNWYVDGVEVHNAKTKPREEQYGSTYRVVSVLTVLHQDWLNGKEYKCKVSNKALPAPIEKTISKAKGQPREPQVYTLPPSREEMTKNQVSLTCLVKGFYPSDIAVEWESNGQPENNYKTTPPVLDSDGSFFLYSKLTVDKSRWQQGNVFSCSVMHEALHNHYTQKSLSLSPGKGGGGSGGGGSGGGGSGGGGSGGGGSGGGGSDKTHTCPPCPAPELLGGPSVFLFPPKPKDTLMISRTPEVTCVVVDVSHEDPEVKFNWYVDGVEVHNAKTKPREEQYGSTYRVVSVLTVLHQDWLNGKEYKCKVSNKALPAPIEKTISKAKGQPREPQVYTLPPSREEMTKNQVSLTCLVKGFYPSDIAVEWESNGQPENNYKTTPPVLDSDGSFFLYSKLTVDKSRWQQGNVFSCSVMHEALHNHYTQKSLSLSPGK

SEQ ID NO: 635 - protein, 480 aa, Artificial
  scFc-6
DKTHTCPPCPAPELLGGPSVFLFPPKPKDTLMISRTPEVTCVVVDVSHEDPEVKFNWYVDGVEVHNAKTKPREEQYGSTYRVVSVLTVLHQDWLNGKEYKCKVSNKALPAPIEKTISKAKGQPREPQVYTLPPSREEMTKNQVSLTCLVKGFYPSDIAVEWESNGQPENNYKTTPPVLDSDGSFFLYSKLTVDKSRWQQGNVFSCSVMHEALHNHYTQKSLSLSPGGGGSGGGGSGGGGSGGGGSGGGGSGGGGSDKTHTCPPCPAPELLGGPSVFLFPPKPKDTLMISRTPEVTCVVVDVSHEDPEVKFNWYVDGVEVHNAKTKPREEQYGSTYRVVSVLTVLHQDWLNGKEYKCKVSNKALPAPIEKTISKAKGQPREPQVYTLPPSREEMTKNQVSLTCLVKGFYPSDIAVEWESNGQPENNYKTTPPVLDSDGSFFLYSKLTVDKSRWQQGNVFSCSVMHEALHNHYTQKSLSLSP

SEQ ID NO: 636 - protein, 484 aa, Artificial
  scFc-7
DKTHTCPPCPAPELLGGPSVFLFPPKPKDTLMISRTPEVTCVVVDVSHEDPEVKFNWYVDGVEVHNAKTKPCEEQYNSTYRCVSVLTVLHQDWLNGKEYKCKVSNKALPAPIEKTISKAKGQPREPQVYTLPPSREEMTKNQVSLTCLVKGFYPSDIAVEWESNGQPENNYKTTPPVLDSDGSFFLYSKLTVDKSRWQQGNVFSCSVMHEALHNHYTQKSLSLSPGKGGGGSGGGGSGGGGSGGGGSGGGGSGGGGSDKTHTCPPCPAPELLGGPSVFLFPPKPKDTLMISRTPEVTCVVVDVSHEDPEVKFNWYVDGVEVHNAKTKPCEEQYNSTYRCVSVLTVLHQDWLNGKEYKCKVSNKALPAPIEKTISKAKGQPREPQVYTLPPSREEMTKNQVSLTCLVKGFYPSDIAVEWESNGQPENNYKTTPPVLDSDGSFFLYSKLTVDKSRWQQGNVFSCSVMHEALHNHYTQKSLSLSPGK

SEQ ID NO: 637 - protein, 480 aa, Artificial
  scFc-8
DKTHTCPPCPAPELLGGPSVFLFPPKPKDTLMISRTPEVTCVVVDVSHEDPEVKFNWYVDGVEVHNAKTKPCEEQYNSTYRCVSVLTVLHQDWLNGKEYKCKVSNKALPAPIEKTISKAKGQPREPQVYTLPPSREEMTKNQVSLTCLVKGFYPSDIAVEWESNGQPENNYKTTPPVLDSDGSFFLYSKLTVDKSRWQQGNVFSCSVMHEALHNHYTQKSLSLSPGGGGSGGGGSGGGGSGGGGSGGGGSGGGGSDKTHTCPPCPAPELLGGPSVFLFPPKPKDTLMISRTPEVTCVVVDVSHEDPEVKFNWYVDGVEVHNAKTKPCEEQYNSTYRCVSVLTVLHQDWLNGKEYKCKVSNKALPAPIEKTISKAKGQPREPQVYTLPPSREEMTKNQVSLTCLVKGFYPSDIAVEWESNGQPENNYKTTPPVLDSDGSFFLYSKLTVDKSRWQQGNVFSCSVMHEALHNHYTQKSLSLSP

SEQ ID NO: 638 - protein, 5 aa, Artificial
  5x his-tag
HHHHH

SEQ ID NO: 639 - protein, 6 aa, Artificial
  6x his-tag
HHHHHH

SEQ ID NO: 640 - protein, 502 aa, Artificial
  CL-1 x I2C
QVQLVQSGAEVKKPGASVKVSCKASGYTFTGYYMHWVRQAPGQCLEWMGWINPNSGGTKYAQKFQGRVTMTRDTSISTAYMELSRLRSDDTAVYYCARDRITVAGTYYYYGMDVWGQGTTVTVSSGGGGSGGGGSGGGGSDIQMTQSPSSVSASVGDRVTITCRASQGVNNWLAWYQQKPGKAPKLLIYTASSLQSGVPSRFSGSGSGTDFTLTIRSLQPEDFATYYCQQANSFPITFGCGTRLEIKSGGGGSEVQLVESGGGLVQPGGSLKLSCAASGFTFNKYAMNWVRQAPGKGLEWVARIRSKYNNYATYYADSVKDRFTISRDDSKNTAYLQMNNLKTEDTAVYYCVRHGNFGNSYISYWAYWGQGTLVTVSSGGGGSGGGGSGGGGSQTVVTQEPSLTVSPGGTVTLTCGSSTGAVTSGNYPNWVQQKPGQAPRGLIGGTKFLAPGTPARFSGSLLGGKAALTLSGVQPEDEAEYYCVLWYSNRWVFGGGTKLTVL

SEQ ID NO: 641 - protein, 502 aa, Artificial
  CL-2 x I2C
QVQMVQSGAEVKKHGASVKVSCKASGYTFTGYYMHWVRQAPGQCLEWMGWINPNSGGTKYAQKFQGRVTMTRDTSISTAYMELSRLRSDDTAVYYCARDRITVAGTYYYYGMDVWGQGTTVTVSSGGGGSGGGGSGGGGSDIQMTQSPSSVSASVGDRVTITCRASQGVNNWLAWYQQKPGKAPKLLIYTASSLQSGVPSRFSGSGSGTDFTLTIRSLQPEDFATYYCQQANSFPITFGCGTRLEIKSGGGGSEVQLVESGGGLVQPGGSLKLSCAASGFTFNKYAMNWVRQAPGKGLEWVARIRSKYNNYATYYADSVKDRFTISRDDSKNTAYLQMNNLKTEDTAVYYCVRHGNFGNSYISYWAYWGQGTLVTVSSGGGGSGGGGSGGGGSQTVVTQEPSLTVSPGGTVTLTCGSSTGAVTSGNYPNWVQQKPGQAPRGLIGGTKFLAPGTPARFSGSLLGGKAALTLSGVQPEDEAEYYCVLWYSNRWVFGGGTKLTVL

SEQ ID NO: 642 - protein, 508 aa, Artificial
  CL-1 x I2C-6His
QVQLVQSGAEVKKPGASVKVSCKASGYTFTGYYMHWVRQAPGQCLEWMGWINPNSGGTKYAQKFQGRVTMTRDTSISTAYMELSRLRSDDTAVYYCARDRITVAGTYYYYGMDVWGQGTTVTVSSGGGGSGGGGSGGGGSDIQMTQSPSSVSASVGDRVTITCRASQGVNNWLAWYQQKPGKAPKLLIYTASSLQSGVPSRFSGSGSGTDFTLTIRSLQPEDFATYYCQQANSFPITFGCGTRLEIKSGGGGSEVQLVESGGGLVQPGGSLKLSCAASGFTFNKYAMNWVRQAPGKGLEWVARIRSKYNNYATYYADSVKDRFTISRDDSKNTAYLQMNNLKTEDTAVYYCVRHGNFGNSYISYWAYWGQGTLVTVSSGGGGSGGGGSGGGGSQTVVTQEPSLTVSPGGTVTLTCGSSTGAVTSGNYPNWVQQKPGQAPRGLIGGTKFLAPGTPARFSGSLLGGKAALTLSGVQPEDEAEYYCVLWYSNRWVFGGGTKLTVLHHHHHH

SEQ ID NO: 643 - protein, 508 aa, Artificial
  CL-2 x I2C-6His
QVQMVQSGAEVKKHGASVKVSCKASGYTFTGYYMHWVRQAPGQCLEWMGWINPNSGGTKYAQKFQGRVTMTRDTSISTAYMELSRLRSDDTAVYYCARDRITVAGTYYYYGMDVWGQGTTVTVSSGGGGSGGGGSGGGGSDIQMTQSPSSVSASVGDRVTITCRASQGVNNWLAWYQQKPGKAPKLLIYTASSLQSGVPSRFSGSGSGTDFTLTIRSLQPEDFATYYCQQANSFPITFGCGTRLEIKSGGGGSEVQLVESGGGLVQPGGSLKLSCAASGFTFNKYAMNWVRQAPGKGLEWVARIRSKYNNYATYYADSVKDRFTISRDDSKNTAYLQMNNLKTEDTAVYYCVRHGNFGNSYISYWAYWGQGTLVTVSSGGGGSGGGGSGGGGSQTVVTQEPSLTVSPGGTVTLTCGSSTGAVTSGNYPNWVQQKPGQAPRGLIGGTKFLAPGTPARFSGSLLGGKAALTLSGVQPEDEAEYYCVLWYSNRWVFGGGTKLTVLHHHHHH

SEQ ID NO: 644 - protein, 6 aa, Artificial
  AU1 epitope
DTYRYI

SEQ ID NO: 645 - protein, 6 aa, Artificial
  AU5 epitope
TDFYLK

SEQ ID NO: 646 - protein, 11 aa, Artificial
  T-7 tag
MASMTGGQQMG

SEQ ID NO: 647 - protein, 14 aa, Artificial
  V-5 tag
GKPIPNPLLGLDST

SEQ ID NO: 648 - protein, 6 aa, Artificial
  B-tag
QYPALT

SEQ ID NO: 649 - protein, 10 aa, Artificial
  E2 epitope
SSTSSDFRDR

SEQ ID NO: 650 - protein, 7 aa, Artificial
  FLAG tag
DYKDDDK

SEQ ID NO: 651 - protein, 6 aa, Artificial
  Glu-Glu tag 1
EYMPME

SEQ ID NO: 652 - protein, 6 aa, Artificial
  Glu-Glu tag 2
EFMPME

SEQ ID NO: 653 - protein, 19 aa, Artificial
  Histidine affinity tag
KDHLIHNVHKEFHAHAHNK

SEQ ID NO: 654 - protein, 8 aa, Artificial
  HSV epitope
QPELAPED

SEQ ID NO: 655 - protein, 11 aa, Artificial
  KT3 epitope
KPPTPPPEPET

SEQ ID NO: 656 - protein, 11 aa, Artificial
  Myc epitope
CEQKLISEEDL

SEQ ID NO: 657 - protein, 7 aa, Artificial
  7x his-tag
HHHHHHH

SEQ ID NO: 658 - protein, 8 aa, Artificial
  8x his-tag
HHHHHHHH

SEQ ID NO: 659 - protein, 9 aa, Artificial
  S1 tag
NANNPDWDF

SEQ ID NO: 660 - protein, 15 aa, Artificial
  S-tag
KETAAAKFERQHMDS

SEQ ID NO: 661 - protein, 8 aa, Artificial
  Strep-tag 1
WSHPQFEK

SEQ ID NO: 662 - protein, 9 aa, Artificial
  Strep-tag 2
AWAHPQPGG

SEQ ID NO: 663 - protein, 6 aa, Artificial
  Universal tag
HTTPHH

SEQ ID NO: 664 - protein, 11 aa, Artificial
  VSV-G
YTDIEMNRLGK

SEQ ID NO: 665 - protein, 12 aa, Artificial
  Protein C
EDQVDPRLIDGK

SEQ ID NO: 666 - protein, 16 aa, Artificial
  Ab156
RDWDFDVFGGGTPVGG

SEQ ID NO: 667 - protein, 8 aa, Artificial
  H-CDR3
  MISC_FEATURE (1)..(1): Xaa at position 1 can be either A or N
  MISC_FEATURE (5)..(5): Xaa at position 5 can be either V or E
  MISC_FEATURE (8)..(8): Xaa at position 8 can be either V or A
XLIVXAPX

SEQ ID NO: 668 - protein, 10 aa, Artificial
  H-CDR3
  MISC_FEATURE (2)..(2): Xaa at position 2 can be either A or N
  MISC_FEATURE (6)..(6): Xaa at position 6 can be either V or E
  MISC_FEATURE (9)..(9): Xaa at position 9 can be either V or A
DXLIVXAPXT

SEQ ID NO: 669 - protein, 20 aa, Artificial
  H-CDR3
  MISC_FEATURE (2)..(2): Xaa at position 2 can be either A or N
  MISC_FEATURE (6)..(6): Xaa at position 6 can be either V or E
  MISC_FEATURE (9)..(9): Xaa at position 9 can be either V or A
DXLIVXAPXTRDYYYYGMDV

SEQ ID NO: 670 - protein, 5 aa, Artificial
  CD3 BINDER / I2E - HCDR1
KYAIN

SEQ ID NO: 671 - protein, 19 aa, Artificial
  CD3 BINDER / I2E - HCDR2
RIRSKYNNYATYYADAVKD

SEQ ID NO: 672 - protein, 14 aa, Artificial
  CD3 BINDER / I2E - HCDR3
AGNFGSSYISYWAY

SEQ ID NO: 673 - protein, 14 aa, Artificial
  CD3 BINDER / I2E - LCDR1
GSSTGAVTSGNYPN

SEQ ID NO: 674 - protein, 7 aa, Artificial
  CD3 BINDER /I2E - LCDR2
GTKFLAP

SEQ ID NO: 675 - protein, 9 aa, Artificial
  CD3 BINDER I2E - LCDR3
VLWYSNRWV

SEQ ID NO: 676 - protein, 125 aa, Artificial
  CD3 BINDER / I2E - VH
EVQLVESGGGLVQPGGSLKLSCAASGFTFNKYAINWVRQAPGKGLEWVARIRSKYNNYATYYADAVKDRFTISRDDSKNTVYLQMNNLKTEDTAVYYCARAGNFGSSYISYWAYWGQGTLVTVSS

SEQ ID NO: 677 - protein, 109 aa, Artificial
  CD3 BINDER / I2E - VL
QTVVTQEPSLTVSPGGTVTITCGSSTGAVTSGNYPNWVQKKPGQAPRGLIGGTKFLAPGTPARFSGSLSGGKAALTLSGVQPEDEAEYYCVLWYSNRWVFGSGTKLTVL

SEQ ID NO: 678 - protein, 249 aa, Artificial
  CD3 BINDER / I2E-SCFV (G4S)3
EVQLVESGGGLVQPGGSLKLSCAASGFTFNKYAINWVRQAPGKGLEWVARIRSKYNNYATYYADAVKDRFTISRDDSKNTVYLQMNNLKTEDTAVYYCARAGNFGSSYISYWAYWGQGTLVTVSSGGGGSGGGGSGGGGSQTVVTQEPSLTVSPGGTVTITCGSSTGAVTSGNYPNWVQKKPGQAPRGLIGGTKFLAPGTPARFSGSLSGGKAALTLSGVQPEDEAEYYCVLWYSNRWVFGSGTKLTVL

SEQ ID NO: 679 - protein, 4 aa, Artificial
  G4-linker
GGGG

SEQ ID NO: 680 - protein, 8 aa, Artificial
  HCDR1
GYSFTGYT

SEQ ID NO: 681 - protein, 8 aa, Artificial
  HCDR2
INPYNGGT

SEQ ID NO: 682 - protein, 8 aa, Artificial
  HCDR2
INPYNGGS

SEQ ID NO: 683 - protein, 8 aa, Artificial
  HCDR2
INPYNGGI

SEQ ID NO: 684 - protein, 10 aa, Artificial
  HCDR3
ARDYGYVLDY

SEQ ID NO: 685 - protein, 10 aa, Artificial
  HCDR3
ARDFGYVLDY

SEQ ID NO: 686 - protein, 10 aa, Artificial
  HCDR3
ARDYGFVLDY

SEQ ID NO: 687 - protein, 10 aa, Artificial
  HCDR3
ARDYGYVFDY

SEQ ID NO: 688 - protein, 5 aa, Artificial
  LCDR1
SSVSY

SEQ ID NO: 689 - protein, 5 aa, Artificial
  LCDR1
SSVNY

SEQ ID NO: 690 - protein, 3 aa, Artificial
  LCDR2
STS

SEQ ID NO: 691 - protein, 10 aa, Artificial
  LCDR3
QQRSIYPPWT

SEQ ID NO: 692 - protein, 10 aa, Artificial
  LCDR3
QQRSNYPPWT

SEQ ID NO: 693 - protein, 10 aa, Artificial
  LCDR3
QQRSTYPPWT

SEQ ID NO: 694 - protein, 10 aa, Artificial
  LCDR3
QQRNNYPPWT

SEQ ID NO: 695 - protein, 12 aa, Artificial
  LCDR1
  MISC_FEATURE (7)..(7): Xaa at position 7 can be selected from S and R
  MISC_FEATURE (9)..(9): Xaa at position 9 can be selected from S and T
RASQSVXSXYLA

SEQ ID NO: 696 - protein, 9 aa, Artificial
  LCDR3
  MISC_FEATURE (4)..(4): Xaa at position 4 can be selected from G, D and Q
  MISC_FEATURE (5)..(5): Xaa at position 5 can be selected from S, A and T
  MISC_FEATURE (8)..(8): Xaa at position 8 can be selected from L and I
QQYXXSPXT
